(19) United States
(12) Patent Application Publication
(10) Pub. No.: US 2024/0301426 A1
(43) Pub. Date: Sep. 12, 2024

(54) LEUCINE-RICH REPEAT KINASE 2 (LRRK2) IRNA AGENT COMPOSITIONS AND METHODS OF USE THEREOF

(71) Applicant: ALNYLAM PHARMACEUTICALS, INC., CAMBRIDGE, MA (US)

(72) Inventors: LAN THI HOANG DANG, ARLINGTON, MA (US); JAMES D. MCININCH, BURLINGTON, MA (US); MARK K. SCHLEGEL, LEXINGTON, MA (US); ADAM CASTORENO, FRAMINGHAM, MA (US); TUYEN M. NGUYEN, MILTON, MA (US); JOSEPH BARRY, ARLINGTON, MA (US); MATTHEW STRICOS, MILLIS, MA (US); SARAH LEBLANC, CAMBRIDGE, MA (US)

(73) Assignee: ALNYLAM PHARMACEUTICALS, INC., CAMBRIDGE, MA (US)

(21) Appl. No.: 18/575,157

(22) PCT Filed: Jun. 29, 2022
(86) PCT No.: PCT/US2022/035561

§ 371 Date: Dec. 28, 2023

Related U.S. Application Data
(60) Provisional application No. 63/353,953, filed on Jun. 21, 2022.
(60) Provisional application No. 63/216,119, filed on Jun. 29, 2021.

(51) Int. Cl. C12N 15/113; G01N 33/573

(52) U.S. Cl. CPC C12N 15/1137; C12Y 207/11001; G01N 33/573; C12N 2310/14; C12N 2310/3515; G01N 2333/912; G01N 2800/2835

(57) ABSTRACT

The disclosure relates to double stranded ribonucleic acid (dsRNAi) agents and compositions targeting a leucine-rich repeat kinase 2 (LRRK2) gene, as well as methods of inhibiting expression of a LRRK2 gene and methods of treating subjects having a LRRK2-associated disease or disorder, e.g., Parkinson's disease, using such dsRNAi agents and compositions.

### CROSS-REFERENCE TO RELATED APPLICATIONS

[0001] This application claims the benefit of priority to U.S. Provisional Application No. 63/216,119, filed on Jun. 29, 2021, and U.S. Provisional Application No. 63/353,953, filed on Jun. 21, 2022, each of which is incorporated herein by reference in its entirety.

### SEQUENCE LISTING

[0002] The instant application contains a Sequence Listing which has been submitted electronically in ASCII format and is hereby incorporated by reference in its entirety. The ASCII copy, created on Jun. 28, 2022, is named A108868_1270WO_SL.txt and is 691,284 bytes in size.

### BACKGROUND OF THE INVENTION

[0003] The leucine-rich repeat kinase 2 (LRRK2) gene encoding the protein LRRK2 is located in the chromosomal region 12q11.2-q13.1. LRRK2 belongs to the Roco protein family of the Ras/GTPase superfamily. The highly conserved LRRK2 protein is made up of 51 exons with a total of 2527 amino acids comprising enzymatic domains including a ROC (Ras of complex) GTPase domain and a serine/threonine kinase domain. Other protein-interacting domains in LRRK2 protein, include a leucine-rich repeat domain, a C-terminal WD40 repeat domain, and armadillo and ankyrin repeat domains Mutations in the LRRK2 gene have been implicated as causative for a dominantly inherited form of Parkinson's disease (PD), a progressively debilitating neurodegenerative syndrome. LRRK2 mutations have been associated with phenotypic manifestations of frontotemporal lobar degeneration, corticobasal degeneration, degeneration of dopaminergic neurons in the substantia nigra pars compacta (SNpc), the presence of Lewy bodies (neuronal inclusions of aggregated α-synuclein and other ubiquitinated proteins) and associated motor neuron disease in patients. LRRK2 mutations have also been found in sporadic PD cases having single nucleotide polymorphisms (SNPs) that confer increased LRRK2 expression (about 2-fold increase), which may contribute to disease etiology due to an increased kinase activity established. Given the similarities in the clinical presentation of LRRK2-associated familial and sporadic PD it is likely that missense and/or deletion mutations in LRRK2 play a critical role in the disease etiology of familial and sporadic PD.

[0004] There is currently no cure for Parkinson's disease, and treatments are only aimed at alleviating the symptoms and improving the patient's quality of life as the disease progresses. Accordingly, there is a need for agents that can selectively and efficiently inhibit the expression of the LRRK2 gene such that subjects having a LRRK2-associated disorder, e.g., Parkinson's disease, can be effectively treated.

### SUMMARY OF THE INVENTION

[0005] The present disclosure provides RNAi compositions, which effect the RNA-induced silencing complex (RISC)-mediated cleavage of RNA transcripts of a LRRK2 gene. The LRRK2 gene may be within a cell, e.g., a cell within a subject, such as a human. The use of these iRNAs enables the targeted degradation of mRNAs of the corresponding gene (LRRK2 gene) in mammals.

[0006] The iRNAs of the invention have been designed to target a LRRK2 gene, e.g., a LRRK2 gene having a missense and/or deletion mutations in the exons of the gene, and having a combination of nucleotide modifications. The iRNAs of the invention inhibit the expression of the LRRK2 gene by at least about 25%, at least about 30%, at least about 40%, at least about 50%, at least about 60%, at least about 70%, at least about 80%, at least about 90%, or at least about 95%, relative to control levels. and reduce the level of sense- and antisense-containing foci. Without intending to be limited by theory, it is believed that a combination or sub-combination of the foregoing properties and the specific target sites, or the specific modifications in these iRNAs confer to the iRNAs of the invention improved efficacy, stability, potency, durability, and safety. In one aspect, the present invention provides double stranded ribonucleic acid (dsRNA) agent for inhibiting expression of LRRK2, wherein the dsRNA agent comprises a sense strand and an antisense strand forming a double stranded region, wherein the sense strand comprises at least 15 contiguous nucleotides differing by no more than 3 nucleotides from the nucleotide sequence of SEQ ID NO: 1808 and the antisense strand comprises at least 15 contiguous nucleotides differing by no more than 3 nucleotides from the nucleotide sequence of SEQ ID NO: 1809.

[0007] In another aspect, the present invention provides a double stranded ribonucleic acid (dsRNA) agent for inhibiting expression of LRRK2, wherein the dsRNA agent comprises a sense strand and an antisense strand forming a double stranded region, wherein the antisense strand comprises a region of complementarity to an mRNA encoding LRRK2, and wherein the region of complementarity comprises at least 15 contiguous nucleotides differing by no more than 3 nucleotides from the nucleotide sequence of SEQ ID NO:1809.

[0008] In yet another aspect, the present invention provides a double stranded ribonucleic acid (dsRNA) agent for inhibiting expression of LRRK2, wherein the dsRNA agent comprises a sense strand and an antisense strand forming a double stranded region, wherein the antisense strand comprises a region of complementarity to an mRNA encoding LRRK2, and wherein the region of complementarity comprises at least 15 contiguous nucleotides differing by no more than 3 nucleotides from any one of the antisense nucleotide sequences in any one of Tables 3-7.

[0009] In one embodiment, the sense strand comprises at least 15 contiguous nucleotides differing by no more than three nucleotides from any one of the nucleotide sequence of nucleotides 1458-1478, 1484-1504, 1761-1781, 1950-1970, 2076-2096, 2094-2114, 2212-2232, 2213-2233, 2268-2288, 2431-2451, 2529-2549, 2565-2585, 2566-2586, 2569-2589, 2583-2603, 2605-2625, 2657-2677, 2764-2784, 2867-2887, 2881-2901, 2883-2903, 3022-3042, 3198-3218, 3330-3350, 3348-3368, 3395-3415, 3629-3649, 3630-3650, 3712-3732, 3713-3733, 3715-3735, 3717-3737, 3720-3740, 3727-3747, 3796-3816, 3800-3820, 3822-3842, 3829-3849, 3875-3895, 3971-3991, 4130-4150, 4443-4463, 4447-4467,4449-4469, 4478-4498,4488-4508, 4619-4639, 4652-4672, 4868-4888, 4950-4970, 4970-4990, 4971-4991, 4972-4992, 5092-5112, 5202-5222, 5226-5246, 5232-5252, 5233-5253, 5273-5293, 5318-5338, 5367-5387, 5368-5388, 5370-5390, 5373-5393, 5425-5445, 5443-5463, 5457-5477, 5461-5481, 5471-5491, 5475-5495, 5501-5521, 5557-5577, 5640-5660, 5646-5666, 5659-5679, 5674-5694, 5675-5695, 5676-5696, 5682-5702, 5684-5704, 5722-5742, 5725-5745, 5778-5798, 5779-5799, 5793-5813, 5964-5984, 5965-5985, 5984-6004, 6029-6049, 6092-6112, 6093-6113, 6094-6114, 6096-6116, 6127-6147, 6143-6163, 6165-6185, 6172-6192, 6173-6193, 6174-6194, 6175-6195, 6198-6218, 6319-6339, 6339-6359, 6418-6438, 6531-6551, 6536-6556, 6541-6561, 6573-6593, 6662-6682, 6730-6750, 6740-6760, 6742-6762, 6786-6806, 6791-6811, 6803-6823, 6804-6824, 6805-6825, 6807-6827, 6810-6830, 6811-6831, 6812-6832, 6818-6838, 6872-6892, 7004-7024, 7018-7038, 7020-7040, 7027-7047, 7028-7048, 7085-7105, 7103-7123, 7115-7135, 7121-7141, 7127-7147, 7242-7262, 7348-7368, 7397-7417, 7404-7424, 7405-7425, 7421-7441, 7443-7463, 7444-7464, 7445-7465, 7493-7513,7535-7555, 7538-7558,7539-7559, 7593-7613, 7629-7649, 7637-7657, 7638-7658, 7639-7659, 7671-7691, 7727-7747, 7729-7749, 8134-8154, 8135-8155, 1484-1504, 1488-1508, 1755-1775, 1761-1781, 1905-1925, 1945-1965, 1950-1970,2029-2049, 2207-2227, 2212-2232, 2213-2233, 2431-2451, 2529-2549, 2565-2585, 2569-2589, 2648-2668, 2764-2784, 2874-2894, 2881-2901, 3051-3071, 3193-3213, 3198-3218, 3208-3228, 3330-3350, 3331-3351, 3350-3370, 3380-3400, 3390-3410, 3395-3415, 3573-3593, 3622-3642, 3632-3652, 3712-3732, 3715-3735, 3717-3737, 3718-3738, 3740-3760, 3795-3815, 3806-3826, 3829-3849, 3830-3850, 3938-3958, 3950-3970, 3971-3991, 4367-4387, 4376-4396, 4444-4464, 4446-4466, 4447-4467,4551-4571, 4554-4574,4704-4724, 4834-4854, 4839-4859, 4925-4945, 4970-4990, 4971-4991, 4972-4992, 5058-5078, 5092-5112, 5128-5148, 5196-5216, 5226-5246, 5275-5295, 5322-5342, 5349-5369, 5352-5372, 5365-5385, 5367-5387, 5368-5388, 5370-5390, 5373-5393, 5461-5481, 5475-5495, 5482-5502, 5515-5535, 5516-5536, 5541-5561, 5557-5577, 5607-5627, 5635-5655, 5641-5661, 5643-5663, 5644-5664, 5646-5666, 5655-5675, 5659-5679, 5660-5680, 5671-5691, 5674-5694, 5682-5702, 5683-5703, 5684-5704, 5721-5741, 5757-5777, 5763-5783, 5772-5792, 5773-5793, 5776-5796, 5777-5797, 5778-5798, 5779-5799, 5793-5813, 5794-5814, 5964-5984, 5965-5985, 5966-5986, 5980-6000, 5984-6004, 6029-6049, 6030-6050, 6071-6091, 6092-6112, 6093-6113, 6095-6115, 6129-6149, 6135-6155, 6136-6156,6142-6162, 6145-6165, 6171-6191, 6172-6192, 6174-6194, 6175-6195, 6178-6198, 6180-6200, 6196-6216, 6197-6217, 6198-6218, 6344-6364, 6355-6375, 6520-6540, 6536-6556, 6538-6558, 6539-6559, 6541-6561, 6723-6743, 6724-6744, 6729-6749, 6730-6750, 6737-6757, 6740-6760, 6742-6762, 6743-6763, 6786-6806, 6787-6807, 6791-6811, 6793-6813, 6794-6814, 6803-6823, 6805-6825, 6806-6826, 6807-6827, 6808-6828, 6810-6830, 6811-6831, 6812-6832, 6813-6833, 6814-6834, 6818-6838, 6828-6848, 6829-6849, 6834-6854, 6872-6892, 6918-6938, 6919-6939, 6920-6940, 6922-6942, 6989-7009, 7004-7024, 7012-7032, 7023-7043, 7035-7055, 7036-7056, 7041-7061,7085-7105, 7103-7123,7114-7134, 7116-7136, 7121-7141, 7129-7149, 7146-7166, 7149-7169, 7242-7262, 7247-7267, 7303-7323, 7348-7368, 7353-7373, 7397-7417, 7404-7424, 7405-7425, 7443-7463, 7493-7513, 7533-7553, 7538-7558, 7539-7559, 7593-7613, 7627-7647, 7629-7649, 7727-7747, 8005-8025, 8007-8027 and 8134-8154 of SEQ ID NO: 1, and the antisense strand comprises at least 15 contiguous nucleotides from the corresponding nucleotide sequence of SEQ ID NO: 2.

[0010] In one embodiment, the sense strand comprises at least 15 contiguous nucleotides differing by no more than three nucleotides from any one of the nucleotide sequence of nucleotides 212-232, 238-258, 515-535, 704-724, 830-850, 848-868, 966-986, 967-987, 1022-1042, 1185-1205, 1283-1303, 1319-1339, 1320-1340, 1323-1343, 1337-1357, 1359-1379, 1411-1431, 1518-1538, 1621-1641, 1635-1655, 1637-1657, 1776-1796, 1952-1972, 2084-2104, 2102-2122,2149-2169, 2383-2403,2384-2404, 2466-2486, 2467-2487, 2469-2489, 2471-2491, 2474-2494,2481-2501, 2550-2570,2554-2574, 2576-2596,2583-2603, 2629-2649, 2725-2745, 2884-2904, 3197-3217, 3201-3221, 3203-3223, 3232-3252, 3242-3262, 3373-3393, 3406-3426, 3622-3642, 3704-3724, 3724-3744, 3725-3745, 3726-3746, 3846-3866, 3956-3976, 3980-4000, 3986-4006, 3987-4007, 4027-4047, 4072-4092,4121-4141, 4122-4142,4124-4144, 4127-4147,4179-4199, 4197-4217, 4211-4231,4215-4235, 4225-4245,4229-4249, 4255-4275,4311-4331, 4394-4414, 4400-4420, 4413-4433, 4428-4448, 4429-4449, 4430-4450, 4436-4456, 4438-4458, 4476-4496, 4479-4499, 4532-4552, 4533-4553, 4547-4567, 4718-4738, 4719-4739, 4738-4758, 4783-4803, 4846-4866, 4847-4867, 4848-4868, 4850-4870, 4881-4901, 4897-4917, 4919-4939, 4926-4946,4927-4947, 4928-4948,4929-4949, 4952-4972, 5073-5093, 5093-5113, 5172-5192, 5285-5305, 5290-5310, 5295-5315, 5327-5347, 5416-5436, 5484-5504, 5494-5514, 5496-5516, 5540-5560, 5545-5565, 5557-5577, 5558-5578, 5559-5579, 5561-5581, 5564-5584, 5565-5585, 5566-5586, 5572-5592, 5626-5646, 5758-5778, 5772-5792, 5774-5794, 5781-5801, 5782-5802, 5839-5859, 5857-5877,5869-5889, 5875-5895, 5881-5901, 5996-6016, 6102-6122, 6151-6171, 6158-6178, 6159-6179, 6175-6195, 6197-6217, 6198-6218, 6199-6219, 6247-6267, 6289-6309, 6292-6312, 6293-6313, 6347-6367, 6383-6403, 6391-6411, 6392-6412, 6393-6413, 6425-6445, 6481-6501, 6483-6503, 6888-6908 and 6889-6909 of SEQ ID NO: 1808, and the antisense strand comprises at least 15 contiguous nucleotides from the corresponding nucleotide sequence of SEQ ID NO: 1809.

[0011] In one embodiment, the antisense strand comprises at least 15 contiguous nucleotides differing by no more than three nucleotides from any one of the antisense strand nucleotide sequences of a duplex selected from the group consisting of AD-1624152, AD-1624178, AD-1624412, AD-1624595, AD-1624721, AD-1624739, AD-1624856, AD-1624857, AD-1624894, AD-1625057, AD-1625155, AD-1625191, AD-1625192, AD-1625195, AD-1625209, AD-1625230, AD-1625282, AD-1625389, AD-1625485, AD-1625499, AD-1625501, AD-1625610, AD-1625786, AD-1625910, AD-1625928, AD-1625975, AD-1626183, AD-1626184, AD-1626265, AD-1626266, AD-1626268, AD-1626270, AD-1626273, AD-1626280, AD-1626349, AD-1626353, AD-1626375, AD-1626382, AD-1626428, AD-1626524, AD-1626636, AD-1626921, AD-1626925, AD-1626927, AD-1626936, AD-1626946, AD-1627077, AD-1627110, AD-1627308, AD-1627390, AD-1627410, AD-1627411, AD-1627412, AD-1627511, AD, 1627601, AD-1627625, AD-1627631, AD-1627632, AD-1627672, AD-1627717, AD-1627766, AD-1627767, AD-1627769, AD-1627772, AD-1627820, AD-1627838, AD-1627852, AD-1627856, AD-1627866, AD-1627870, AD-1627896, AD-1627952, AD-1628008, AD-1628014, AD-1628027, AD-1628042, AD-1628043, AD-1628044, AD-1628050, AD-1628052, AD-1628070, AD-1628073, AD-1628118, AD-1628119, AD-1628133, AD-1628253, AD-1628254, AD-1628273, AD-1628318, AD-1628381, AD-1628382, AD-1628383, AD-1628385, AD-1628396, AD-1628412, AD-1628434, AD-1628441, AD-1628442, AD-1628443, AD-1628444, AD-1628467, AD-1628570, AD-1628590, AD-1628668, AD-1628754, AD-1628759, AD-1628764, AD-1628794, AD-1628883, AD-1628951, AD-1628961, AD-1628963, AD-1629007, AD-1629012, AD-1629024, AD-1629025, AD-1629026, AD-1629028, AD-1629031, AD-1629032, AD-1629033, AD-1629039, AD-1629092, AD-1629200, AD-1629214, AD-1629216, AD-1629223, AD-1629224, AD-1629263, AD-1629280, AD-1629292, AD-1629298, AD-1629304, AD-1629419, AD-1629524, AD-1629573, AD-1629580, AD-1629581, AD-1629597, AD-1629619, AD-1629620, AD-1629621, AD-1629665, AD-1629707, AD-1629710, AD-1629711, AD-1629763, AD-1629799, AD-1629807, AD-1629808, AD-1629809, AD-1629838, AD-1629876, AD-1629878, AD-1630135, AD-1630136, AD-1631019, AD-1631020, AD-1631021, AD-1631022, AD-1631023, AD-1631024, AD-1631025, AD-1631026, AD-1631027, AD-1631028, AD-1631029, AD-1631030, AD-1631031, AD-1631032, AD-1631033, AD-1631034, AD-1631035, AD-1631036, AD-1631037, AD-1631038, AD-1631039, AD-1631040, AD-1631041, AD-1631042, AD-1631043, AD-1631044, AD-1631045, AD-1631046, AD-1631047, AD-1631048, AD-1631049, AD-1631050, AD-1631051, AD-1631052, AD-1631053, AD-1631054, AD-1631055, AD-1631056, AD-1631057, AD-1631058, AD-1631059, AD-1631060, AD-1631061, AD-1631062, AD-1631063, AD-1631064, AD-1631065, AD-1631066, AD-1631067, AD-1631068, AD-1631069, AD-1631070, AD-1631071, AD-1631072, AD-1631073, AD-1631074, AD-1631075, AD-1631076, AD-1631077, AD-1631078, AD-1631079, AD-1631080, AD-1631081, AD-1631082, AD-1631083, AD-1631084, AD-1631085, AD-1631086, AD-1631087, AD-1631088, AD-1631089, AD-1631090, AD-1631091, AD-1631092, AD-1631093, AD-1631094, AD-1631095, AD-1631096, AD-1631097, AD-1631098, AD-1631099, AD-1631100, AD-1631101, AD-1631102, AD-1631103, AD-1631104, AD-1631105, AD-1631106, AD-1631107, AD-1631108, AD-1631109, AD-1631110, AD-1631111, AD-1631112, AD-1631113, AD-1631114, AD-1631115, AD-1631116, AD-1631117, AD-1631118, AD-1631119, AD-1631120, AD-1631121, AD-1631122, AD-1631123, AD-1631124, AD-1631125, AD-1631126, AD-1631127, AD-1631128, AD-1631129, AD-1631130, AD-1631131, AD-1631132, AD-1631133, AD-1631134, AD-1631135, AD-1631136, AD-1631137, AD-1631138, AD-1631139, AD-1631140, AD-1631141, AD-1631142, AD-1631143, AD-1631144, AD-1631145, AD-1631146, AD-1631147, AD-1631148, AD-1631149, AD-1631150, AD-1631151, AD-1631152, AD-1631153, AD-1631154, AD-1631155, AD-1631156, AD-1631157, AD-1631158, AD-1631159, AD-1631160, AD-1631161, AD-1631162, AD-1631163, AD-1631164, AD-1631165, AD-1631166, AD-1631167, AD-1631168, AD-1631169, AD-1631170, AD-1631171, AD-1631172, AD-1631173, AD-1631174, AD-1631175, AD-1631176, AD-1631177, AD-1631178, AD-1631179, AD-1631180, AD-1631181, AD-1631182, AD-1631183, AD-1631184, AD-1631185, AD-1631186, AD-1631187, AD-1631188, AD-1631189, AD-1631190, AD-1631191, AD-1631192, AD-1631193, AD-1631194, AD-1631195, AD-1631196, AD-1631197, AD-1631198, AD-1631199, AD-1631200, AD-1631201, AD-1631202, AD-1631203, AD-1631204, AD-1631205, AD-1631206, AD-1631207, AD-1631208, AD-1631209, AD-1631210, AD-1631211, AD-1631212, AD-1631213, AD-1631214, AD-1631215, AD-1631216, AD-1631217, AD-1631218, AD-1631219, AD-1631220, AD-1631221, AD-1807334, AD-1807335, AD-1807336, AD-1807337, AD-1807338, AD-1807339, AD-1807340, AD-1807341, AD-1807342, AD-1807343, AD-1807344, AD-1807345, AD-1807346, AD-1807347, AD-1807348, AD-1807349, AD-1807350, AD-1807351, AD-1807352, AD-1807353, AD-1807354, AD-1807355, AD-1807356, AD-1807357, AD-1807358, AD-1807359, AD-1807360, AD-1807361, AD-1807362, AD-1807363, AD-1807364, AD-1807365, AD-1807366, AD-1807367, AD-1807368, AD-1807369, AD-1807370, AD-1807371, AD-1807372, AD-1807373, AD-1807374, AD-1807375, AD-1807376, AD-1807377, AD-1807378, AD-1807379, AD-1807380, AD-1807381, AD-1807382, AD-1807383, AD-1807384, AD-1807385, AD-1807386, AD-1807387, AD-1807388, AD-1807389, AD-1807390, AD-1807391, AD-1807392, AD-1807393, AD-1807394, AD-1807395, AD-1807396, AD-1807397, AD-1807398, AD-1807399, AD-1807400, AD-1807401, AD-1807402, AD-1807403, AD-1807404, AD-1807405, AD-1807406, AD-1807407, AD-1807408, AD-1807409, AD-1807410, AD-1807411, AD-1807412, AD-1807413, AD-1807414, AD-1807415, AD-1807416, AD-1807417, AD-1807418, AD-1807419, AD-1807420, AD-1807421, AD-1807422, and AD-1807423.

[0012] In some embodiments, the nucleotide sequence of the sense and antisense strand comprises any one of the sense strand nucleotide sequences in any one of Tables 3-7.

[0013] In one embodiment, the sense strand, the antisense strand, or both the sense strand and the antisense strand is conjugated to one or more lipophilic moieties.

[0014] In one embodiment, the lipophilic moiety is conjugated to one or more internal positions in the double stranded region of the dsRNA agent.

[0015] In one embodiment, the lipophilic moiety is conjugated via a linker or carrier.

[0016] In one embodiment, the lipophilicity of the lipophilic moiety, measured by log Kow, exceeds 0.

[0017] In one embodiment, the hydrophobicity of the double-stranded RNAi agent, measured by the unbound fraction in a plasma protein binding assay of the double-stranded RNAi agent, exceeds 0.2.

[0018] In one embodiment, the plasma protein binding assay is an electrophoretic mobility shift assay using human serum albumin protein.

[0019] In one embodiment, the sense strand, the antisense strand, or both the sense strand and the antisense strand of the dsRNA agent is conjugated to one or more Asialoglycoprotein receptor (ASGPR) ligands.

[0020] In one embodiment, the ASGPR ligand is attached to the 5′ end or 3′ end of the sense strand of the dsRNA agent.

[0021] In one embodiment, the ASGPR ligand is attached to the 5′ end of the sense strand of the dsRNA agent.

[0022] In one embodiment, the ASGPR ligand is attached to the 3′ end of the sense strand of the dsRNA agent.

[0023] In one embodiment, the ASGPR ligand comprises one or more GalNAc derivatives attached through a bivalent or trivalent branched linker.

[0024] In one embodiment, the ASGPR ligand comprises:

[chemical structure]

[0025] In one embodiment, the ASGPR ligand is:

[chemical structure]

[0026] In various embodiments of the aforementioned dsRNA agents, the dsRNA agent targets a hotspot region of an mRNA encoding LRRK2. In one embodiment, the hotspot region comprises any one of SEQ ID NOs: 2260-2288 of SEQ ID NO: 1 or any one of nucleotides 3620-3652, 3794-3849, 5194-5222, 5366-5393, 5423-5463, 5674-5704, 5720-5745, 6090-6114, 6125-6156, 6518-6561, 6721-6750, 6740-6763, 7016-7061, 7083-7123, 7112-7136, 7125-7169, 7346-7373, 7441-7465, 7591-7659, 7636-7659, 8132-8155, 3627-3650, 5194-5222, 5674-5702, 5720-5745, 6091-6114, 6529-6559, 7034-7061, 7441-7465, and 7636-7659 of SEQ ID NO: 1. The dsRNA agent may be selected from the group consisting of AD-1627308, AD-1631049, AD-1631050, AD-1626349, AD-1626353, AD-1626375, AD-1626382, AD-1631080, AD-1807348, AD-1807393, AD-1631088, AD-1631089, AD-1631090, AD-1631108, AD-1807416, AD-1807371, AD-1627767, AD-1627769, AD-1627772, AD-1631109, AD-1631110, AD-1631111, AD-1627820, AD-1627838, AD-1628042, AD-1628043, AD-1628044, AD-1628050, AD-1628052, AD-1628070, AD-1631108, AD-1631109, AD-1631110, AD-1631111, AD-1807397, AD-1807352, AD-1628073, AD-1807374, AD-1807419, AD-1628381, AD-1628382, AD-1628383, AD-1631131, AD-1631132, AD-1631133, AD-1628396, AD-1807361, AD-1807406, AD-1631150, AD-1631151, AD-1631152, AD-1631153, AD-1631154, AD-1631155, AD-1631156, AD-1631157, AD-1631158, AD-1631160, AD-1631161, AD-1631162, AD-1807357, AD-1807402, AD-1628961, AD-1628963, AD-1629214, AD-1629216, AD-1629223, AD-1629224, AD-1629263, AD-1629280, AD-1631194, AD-1631195, AD-1631196, AD-1631197, AD-1807363, AD-1807408, AD-1629304, AD-1629524, AD-1631205, AD-1631206, AD-1807337, AD-1807354, AD-1807382, AD-1807399, AD-1629619, AD-1629620, AD-1629621, AD-1631210, AD-1807355, AD-1807377, AD-1807400, AD-1807422, AD-1629763, AD-1631215, AD-1631216, AD-1631217, AD-1807335, AD-1807336, AD-1807376, AD-1807380, AD-1807381, AD-1807421, AD-1630135, AD-1630136, AD-1631221, AD-1807369, AD-1807414, AD-1807364, AD-1807409, AD-1629808, and AD-1629809.

[0027] In another aspect, the present invention provides a dsRNA agent that targets a hotspot region of a leucine-rich repeat kinase 2 (LRRK2) mRNA.

[0028] In some embodiments, the dsRNA agent comprises at least one modified nucleotide.

[0029] In one embodiment, no more than five of the sense strand nucleotides and no more than five of the nucleotides of the antisense strand are unmodified nucleotides

[0030] In one embodiment, all of the nucleotides of the sense strand and all of the nucleotides of the antisense strand are modified nucleotides.

[0031] In one embodiment, at least one of the modified nucleotides is selected from the group a deoxy-nucleotide, a 3′-terminal deoxythimidine (dT) nucleotide, a 2′-O-methyl modified nucleotide, a 2′-fluoro modified nucleotide, a 2′-deoxy-modified nucleotide, a locked nucleotide, an unlocked nucleotide, a conformationally restricted nucleotide, a constrained ethyl nucleotide, an abasic nucleotide, a 2′-amino-modified nucleotide, a 2′-O-allyl-modified nucleotide, 2′-C-alkyl-modified nucleotide, 2′-hydroxly-modified nucleotide, a 2′-methoxyethyl modified nucleotide, a 2′-O-alkyl-modified nucleotide, a morpholino nucleotide, a phosphoramidate, a non-natural base comprising nucleotide, a tetrahydropyran modified nucleotide, a 1,5-anhydrohexitol modified nucleotide, a cyclohexenyl modified nucleotide, a nucleotide comprising a 5′-phosphorothioate group, a nucleotide comprising a 5′-methylphosphonate group, a nucleotide comprising a 5′ phosphate or 5′ phosphate mimic, a nucleotide comprising vinyl phosphonate, a nucleotide comprising adenosine-glycol nucleic acid (GNA), a nucleotide comprising thymidine-glycol nucleic acid (GNA)S-Isomer, a nucleotide comprising 2-hydroxymethyl-tetrahydrofurane-5-phosphate, a nucleotide comprising 2′-deoxythymidine-3′phosphate, a nucleotide comprising 2′-deoxyguanosine-3′-phosphate, and a terminal nucleotide linked to a cholesteryl derivative and a dodecanoic acid bisdecylamide group; and combinations thereof.

[0032] In one embodiment, the modified nucleotide is selected from the group consisting of a 2′-deoxy-2′-fluoro modified nucleotide, a 2′-deoxy-modified nucleotide, 3′-terminal deoxythimidine nucleotides (dT), a locked nucleotide, an abasic nucleotide, a 2′-amino-modified nucleotide, a 2′-alkyl-modified nucleotide, a morpholino nucleotide, a phosphoramidate, and a non-natural base comprising nucleotide.

[0033] In one embodiment, the modified nucleotide comprises a short sequence of 3′-terminal deoxythimidine nucleotides (dT).

[0034] In one embodiment, the modifications on the nucleotides are 2′-O-methyl, GNA and 2′fluoro modifications.

[0035] In some embodiments, the dsRNA agent further comprises at least one phosphorothioate internucleotide linkage.

[0036] In one embodiment, the dsRNA agent comprises 6-8 phosphorothioate internucleotide linkages.

[0037] In one embodiment, each strand is no more than 30 nucleotides in length.

[0038] In one embodiment, at least one strand comprises a 3′ overhang of at least 1 nucleotide. In another embodiment, at least one strand comprises a 3′ overhang of at least 2 nucleotides.

[0039] The double stranded region may be 15-30 nucleotide pairs in length; 17-23 nucleotide pairs in length; 17-25 nucleotide pairs in length 23-27 nucleotide pairs in length; 19-21 nucleotide pairs in length; or 21-23 nucleotide pairs in length.

[0040] Each strand may have 19-30 nucleotides; 19-23 nucleotides; or 21-23 nucleotides.

[0041] In one embodiment, one or more lipophilic moieties are conjugated to one or more internal positions on at least one strand, such as via a linker or carrier.

[0042] In one embodiment, the internal positions include all positions except the terminal two positions from each end of the at least one strand.

[0043] In another embodiment, the internal positions include all positions except the terminal three positions from each end of the at least one strand.

[0044] In one embodiment, the internal positions exclude a cleavage site region of the sense strand.

[0045] In one embodiment, the internal positions include all positions except positions 9-12, counting from the 5′-end of the sense strand.

[0046] In another embodiment, the internal positions include all positions except positions 11-13, counting from the 3′-end of the sense strand.

[0047] In one embodiment, the internal positions exclude a cleavage site region of the antisense strand.

[0048] In one embodiment, the internal positions include all positions except positions 12-14, counting from the 5′-end of the antisense strand.

[0049] In one embodiment, the internal positions include all positions except positions 11-13 on the sense strand, counting from the 3′-end, and positions 12-14 on the antisense strand, counting from the 5′-end.

[0050] In one embodiment, the one or more lipophilic moieties are conjugated to one or more of the internal positions selected from the group consisting of positions 4-8 and 13-18 on the sense strand, and positions 6-10- and 15-18 on the antisense strand, counting from the 5′end of each strand.

[0051] In another embodiment, the one or more lipophilic moieties are conjugated to one or more of the internal positions selected from the group consisting of positions 5, 6, 7, 15, and 17 on the sense strand, and positions 15 and 17 on the antisense strand, counting from the 5′-end of each strand.

[0052] In one embodiment, the internal positions in the double stranded region exclude a cleavage site region of the sense strand.

[0053] In one embodiment, the sense strand is 21 nucleotides in length, the antisense strand is 23 nucleotides in length, and the lipophilic moiety is conjugated to position 21, position 20, position 15, position 1, position 7, position 6, or position 2 of the sense strand or position 16 of the antisense strand.

[0054] In one embodiment, the lipophilic moiety is conjugated to position 21, position 20, position 15, position 1, or position 7 of the sense strand.

[0055] In another embodiment, the lipophilic moiety is conjugated to position 21, position 20, or position of the sense strand.

[0056] In yet another embodiment, the lipophilic moiety is conjugated to position 20 or position 15 of the sense strand.

[0057] In one embodiment, the lipophilic moiety is conjugated to position 16 of the antisense strand.

[0058] In one embodiment, the lipophilic moiety is an aliphatic, alicyclic, or polyalicyclic compound.

[0059] In one embodiment, the lipophilic moiety is selected from the group consisting of lipid, cholesterol, retinoic acid, cholic acid, adamantane acetic acid, 1-pyrene butyric acid, dihydrotestosterone, 1,3-bis-O(hexadecyl)glycerol, geranyloxyhexyanol, hexadecylglycerol, borneol, menthol, 1,3-propanediol, heptadecyl group, palmitic acid, myristic acid, O3-(oleoyl) lithocholic acid, O3-(oleoyl)cholenic acid, dimethoxytrityl, or phenoxazine.

[0060] In one embodiment, the lipophilic moiety contains a saturated or unsaturated C4-C30 hydrocarbon chain, and an optional functional group selected from the group consisting of hydroxyl, amine, carboxylic acid, sulfonate, phosphate, thiol, azide, and alkyne.

[0061] In one embodiment, the lipophilic moiety contains a saturated or unsaturated C6-C18 hydrocarbon chain.

[0062] In one embodiment, the lipophilic moiety contains a saturated or unsaturated C16 hydrocarbon chain.

[0063] In one embodiment, the saturated or unsaturated C16 hydrocarbon chain is conjugated to position 6, counting from the 5′-end of the strand.

[0064] In one embodiment, the lipophilic moiety is conjugated via a carrier that replaces one or more nucleotide(s) in the internal position(s) or the double stranded region.

[0065] In one embodiment, the carrier is a cyclic group selected from the group consisting of pyrrolidinyl, pyrazolinyl, pyrazolidinyl, imidazolinyl, imidazolidinyl, piperidinyl, piperazinyl, [1,3]dioxolanyl, oxazolidinyl, isoxazolidinyl, morpholinyl, thiazolidinyl, isothiazolidinyl, quinoxalinyl, pyridazinonyl, tetrahydrofuranyl, and decalinyl; or is an acyclic moiety based on a serinol backbone or a diethanolamine backbone.

[0066] In one embodiment, the lipophilic moiety is conjugated to the double-stranded iRNA agent via a linker containing an ether, thioether, urea, carbonate, amine, amide, maleimide-thioether, disulfide, phosphodiester, sulfonamide linkage, a product of a click reaction, or carbamate.

[0067] In one embodiment, the lipophilic moiety is conjugated to a nucleobase, sugar moiety, or internucleosidic linkage.

[0068] In one embodiment, the lipophilic moiety or targeting ligand is conjugated via a bio-cleavable linker selected from the group consisting of DNA, RNA, disulfide, amide, functionalized monosaccharides or oligosaccharides of galactosamine, glucosamine, glucose, galactose, mannose, and combinations thereof.

[0069] In one embodiment, the 3′ end of the sense strand is protected via an end cap which is a cyclic group having an amine, said cyclic group being selected from the group consisting of pyrrolidinyl, pyrazolinyl, pyrazolidinyl, imidazolinyl, imidazolidinyl, piperidinyl, piperazinyl, [1,3]dioxolanyl, oxazolidinyl, isoxazolidinyl, morpholinyl, thiazolidinyl, isothiazolidinyl, quinoxalinyl, pyridazinonyl, tetrahydrofuranyl, and decalinyl.

[0070] In one embodiment, the dsRNA agent further comprises a targeting ligand that targets a liver tissue.

[0071] In one embodiment, the targeting ligand is a GalNAc conjugate.

[0072] In one embodiment, the dsRNA agent further comprises a terminal, chiral modification occurring at the first internucleotide linkage at the 3′ end of the antisense strand, having the linkage phosphorus atom in Sp configuration, a terminal, chiral modification occurring at the first internucleotide linkage at the 5′ end of the antisense strand, having the linkage phosphorus atom in Rp configuration, and a terminal, chiral modification occurring at the first internucleotide linkage at the 5′ end of the sense strand, having the linkage phosphorus atom in either Rp configuration or Sp configuration.

[0073] In another embodiment, the dsRNA agent further comprises a terminal, chiral modification occurring at the first and second internucleotide linkages at the 3′ end of the antisense strand, having the linkage phosphorus atom in Sp configuration, a terminal, chiral modification occurring at the first internucleotide linkage at the 5′ end of the antisense strand, having the linkage phosphorus atom in Rp configuration, and a terminal, chiral modification occurring at the first internucleotide linkage at the 5′ end of the sense strand, having the linkage phosphorus atom in either Rp or Sp configuration.

[0074] In yet another embodiment, the dsRNA agent further comprises a terminal, chiral modification occurring at the first, second and third internucleotide linkages at the 3′ end of the antisense strand, having the linkage phosphorus atom in Sp configuration, a terminal, chiral modification occurring at the first internucleotide linkage at the 5′ end of the antisense strand, having the linkage phosphorus atom in Rp configuration, and a terminal, chiral modification occurring at the first internucleotide linkage at the 5′ end of the sense strand, having the linkage phosphorus atom in either Rp or Sp configuration.

[0075] In another embodiment, the dsRNA agent further comprises a terminal, chiral modification occurring at the first, and second internucleotide linkages at the 3′ end of the antisense strand, having the linkage phosphorus atom in Sp configuration, a terminal, chiral modification occurring at the third internucleotide linkages at the 3′ end of the antisense strand, having the linkage phosphorus atom in Rp configuration, a terminal, chiral modification occurring at the first internucleotide linkage at the 5′ end of the antisense strand, having the linkage phosphorus atom in Rp configuration, and a terminal, chiral modification occurring at the first internucleotide linkage at the 5′ end of the sense strand, having the linkage phosphorus atom in either Rp or Sp configuration.

[0076] In another embodiment, the dsRNA agent further comprises a terminal, chiral modification occurring at the first, and second internucleotide linkages at the 3′ end of the antisense strand, having the linkage phosphorus atom in Sp configuration, a terminal, chiral modification occurring at the first, and second internucleotide linkages at the 5′ end of the antisense strand, having the linkage phosphorus atom in Rp configuration, and a terminal, chiral modification occurring at the first internucleotide linkage at the 5′ end of the sense strand, having the linkage phosphorus atom in either Rp or Sp configuration.

[0077] In one embodiment, the dsRNA agent further comprises a phosphate or phosphate mimic at the 5′-end of the antisense strand.

[0078] In one embodiment, the phosphate mimic is a 5′-vinyl phosphonate (VP).

[0079] In one embodiment, the base pair at the 1 position of the 5′-end of the antisense strand of the duplex is an AU base pair.

[0080] In one embodiment, the sense strand has a total of 21 nucleotides and the antisense strand has a total of 23 nucleotides.

[0081] The present invention also provides cells and pharmaceutical compositions for inhibiting expression of a gene encoding LRRK2 comprising the dsRNA agents of the invention, such.

[0082] In one embodiment, the dsRNA agent is in an unbuffered solution, such as saline or water.

[0083] In another embodiment, the dsRNA agent is in a buffer solution, such as a buffer solution comprising acetate, citrate, prolamine, carbonate, or phosphate or any combination thereof; or phosphate buffered saline (PBS).

[0084] In one aspect, the present invention provides a method of inhibiting expression of a LRRK2 gene in a cell, the method comprising contacting the cell with a dsRNA agent of the invention, or a pharmaceutical composition of the invention, thereby inhibiting expression of the LRRK2 gene in the cell.

[0085] In one embodiment, cell is within a subject.

[0086] In one embodiment, the subject is a human.

[0087] In one embodiment, the subject has a LRRK2-associated disorder.

[0088] In one embodiment, the LRRK2-associated disorder in the subject is a neurodegenerative disorder.

[0089] In another embodiment, the LRRK2-associated disorder in the subject is an ocular disorder.

[0090] In one embodiment, the LRRK2-associated disorder is selected from the group consisting of Parkinson's disease or related disorders, and ocular disorders.

[0091] In some embodiments, contacting the cell with the dsRNA agent inhibits the expression of LRRK2 by at least about 25%, at least about 30%, at least about 40%, at least about 50%, at least about 60%, at least about 70%, at least about 80%, at least about 90%, or at least about 95%, relative to control levels.

[0092] In some embodiments, inhibiting expression of LRRK2 decreases LRRK2 protein level in serum of the subject by at least about 25%, at least about 30%, at least about 40%, at least about 50%, at least about 60%, at least about 70%, at least about 80%, at least about 90%, or at least about 95%, relative to control levels.

[0093] In one aspect, the present invention provides method of treating a subject having a disorder that would benefit from reduction in LRRK2 expression, comprising administering to the subject a therapeutically effective amount of a dsRNA agent of the invention, or a pharmaceutical composition of the invention, thereby treating the subject having the disorder that would benefit from reduction in LRRK2 expression.

[0094] In another aspect, the present invention provides a method of preventing at least one symptom in a subject having a disorder that would benefit from reduction in LRRK2 expression, comprising administering to the subject a prophylactically effective amount of a dsRNA agent of the invention, or a pharmaceutical composition of the invention, thereby preventing at least one symptom in the subject having the disorder that would benefit from reduction in LRRK2 expression.

[0095] In one embodiment, the disorder is a LRRK2-associated disorder.

[0096] In some embodiments, the LRRK2-associated disorder is selected from the group consisting of Parkinson's disease, Crohn's disease and ocular disorders.

[0097] In one embodiment, the subject is human.

[0098] In one embodiment, the administration of the agent to the subject causes a decrease in LRRK2 protein accumulation.

[0099] In one embodiment, the dsRNA agent is administered to the subject at a dose of about 0.01 mg/kg to about 50 mg/kg.

[0100] In one embodiment, the dsRNA agent is administered to the subject subcutaneously.

[0101] In another embodiment, the dsRNA agent is administered to the subject intrathecally.

[0102] In yet another embodiment, the dsRNA agent is administered to the subject intracisternally. A non-limiting exemplary intracisternal administration comprises an injection into the cisterna magna (cerebellomedullary cistem) by suboccipital puncture.

[0103] In one embodiment, the methods of the invention further comprise determining the level of LRRK2 in a sample(s) from the subject.

[0104] In one embodiment, the level of LRRK2 in the subject sample(s) is a LRRK2 protein level in a blood, serum, or cerebrospinal fluid sample(s).

[0105] In one embodiment, the methods of the invention further comprise administering to the subject an additional therapeutic agent.

[0106] In one aspect, the present invention provides a kit comprising a dsRNA agent of the invention, or a pharmaceutical composition of the invention.

[0107] In another aspect, the present invention provides a vial comprising a dsRNA agent of the invention, or a pharmaceutical composition of the invention.

[0108] In yet another aspect, the present invention provides a syringe comprising a dsRNA agent of the invention, or a pharmaceutical composition of the invention.

[0109] In another aspect, the present invention provides an intrathecal pump comprising a dsRNA agent of the invention, or a pharmaceutical composition of the invention.

### BRIEF DESCRIPTION OF THE DRAWINGS

[0110] The patent or application file contains at least one drawing executed in color. Copies of this patent or patent application publication with color drawing(s) will be provided by the Office upon request and payment of the necessary fee.

[0111] FIG. 1 depicts the sequences and chemistry of exemplary LRRK2 siRNAs including AD-1807334, AD-1807336, AD-1807339, AD-1807344, AD-1807345, AD-1807349, AD-1807352, AD-1807364, AD-1807370, and AD-1807374. For each siRNA, “2-C16” refers to a 2′-O-hexadecyl modification, i.e., conjugation to a C16 ligand; “F” is a 2′-fluoro modification; “OMe” is a methoxy group; “GNA” refers to a glycol nucleic acid; and “PS” refers to a phosphorothioate linkage.

[0112] FIG. 2 is a graph depicting the percent LRRK2 message remaining relative to PBS in the brain tissue of mice on day 14 post-treatment with the exemplary duplexes indicated on the X-axis (from left to right: aCSF, AD-1807334, AD-1807336, AD-1807339, AD-1807344, AD-1807345, AD-1807349, AD-1807352, AD-1807364, AD-1807370, and AD-1807374).

### DETAILED DESCRIPTION OF THE INVENTION

[0113] The present disclosure provides RNAi compositions, which effect the RNA-induced silencing complex (RISC)-mediated cleavage of RNA transcripts of a LRRK2 gene. The LRRK2 gene may be within a cell, e.g., a cell within a subject, such as a human. The use of these iRNAs enables the targeted degradation of mRNAs of the corresponding gene (LRRK2 gene) in mammals.

[0114] The iRNAs of the invention have been designed to target a LRRK2 gene, e.g., a LRRK2 gene either with or without nucleotide modifications. The iRNAs of the invention inhibit the expression of the LRRK2 gene by at least about 25%, at least about 30%, at least about 40%, at least about 50%, at least about 60%, at least about 70%, at least about 80%, at least about 90%, or at least about 95%, relative to control levels, and reduce the level of sense- and antisense-containing foci. Without intending to be limited by theory, it is believed that a combination or sub-combination of the foregoing properties and the specific target sites, or the specific modifications in these iRNAs confer to the iRNAs of the invention improved efficacy, stability, potency, durability, and safety.

[0115] Accordingly, the present disclosure also provides methods of using the RNAi compositions of the disclosure for inhibiting the expression of a LRRK2 gene or for treating a subject having a disorder that would benefit from inhibiting or reducing the expression of a LRRK2 gene, e.g., a LRRK2-associated disease, for example, a neurodegenerative disease such as Parkinson's disease, or an ocular disorder.

[0116] The RNAi agents of the disclosure include an RNA strand (the antisense strand) having a region which is about 30 nucleotides or less in length, e.g., 15-30, 15-29, 15-28, 15-27, 15-26, 15-25, 15-24, 15-23, 15-22, 15-21, 15-20, 15-19, 15-18, 15-17, 18-30, 18-29, 18-28, 18-27, 18-26, 18-25, 18-24, 18-23, 18-22, 18-21, 18-20, 19-30, 19-29, 19-28, 19-27, 19-26, 19-25, 19-24, 19-23, 19-22, 19-21, 19-20, 20-30, 20-29, 20-28, 20-27, 20-26, 20-25, 20-24,20-23, 20-22, 20-21, 21-30, 21-29, 21-28, 21-27, 21-26, 21-25, 21-24, 21-23, or 21-22 nucleotides in length, which region is substantially complementary to at least part of an mRNA transcript of a LRRK2 gene, e.g., an LRRK2 exon. In certain embodiments, the RNAi agents of the disclosure include an RNA strand (the antisense strand) having a region which is about 21-23 nucleotides in length, which region is substantially complementary to at least part of an mRNA transcript of a LRRK2 gene.

[0117] In certain embodiments, the RNAi agents of the disclosure include an RNA strand (the antisense strand) which can include longer lengths, for example up to 66 nucleotides, e.g., 36-66, 26-36, 25-36, 31-60, 22-43, 27-53 nucleotides in length with a region of at least 19 contiguous nucleotides that is substantially complementary to at least a part of an mRNA transcript of a LRRK2 gene. These RNAi agents with the longer length antisense strands preferably include a second RNA strand (the sense strand) of 20-60 nucleotides in length wherein the sense and antisense strands form a duplex of 18-30 contiguous nucleotides.

[0118] The use of these RNAi agents enables the targeted degradation and/or inhibition of mRNAs of a LRRK2 gene in mammals. Thus, methods and compositions including these RNAi agents are useful for treating a subject who would benefit by a reduction in the levels or activity of a LRRK2 protein, such as a subject having a LRRK2-associated disease, such as Parkinson's disease, or an ocular disorder.

[0119] The following detailed description discloses how to make and use compositions containing RNAi agents to inhibit the expression of a LRRK2 gene, as well as compositions and methods for treating subjects having diseases and disorders that would benefit from inhibition or reduction of the expression of the genes.

### I. Definitions

[0120] In order that the present disclosure may be more readily understood, certain terms are first defined. In addition, it should be noted that whenever a value or range of values of a parameter are recited, it is intended that values and ranges intermediate to the recited values are also intended to be part of this disclosure.

[0121] The articles “a” and “an” are used herein to refer to one or to more than one (i.e., to at least one) of the grammatical object of the article. By way of example, “an element” means one element or more than one element, e.g., a plurality of elements.

[0122] The term “including” is used herein to mean, and is used interchangeably with, the phrase “including but not limited to”. The term “or” is used herein to mean, and is used interchangeably with, the term “and/or,” unless context clearly indicates otherwise.

[0123] The term “about” is used herein to mean within the typical ranges of tolerances in the art. For example, “about” can be understood as about 2 standard deviations from the mean. In certain embodiments, about means±10%. In certain embodiments, about means ±5%. When about is present before a series of numbers or a range, it is understood that “about” can modify each of the numbers in the series or range.

[0124] The term “at least” prior to a number or series of numbers is understood to include the number adjacent to the term “at least”, and all subsequent numbers or integers that could logically be included, as clear from context. For example, the number of nucleotides in a nucleic acid molecule must be an integer. For example, “at least 18 nucleotides of a 21 nucleotide nucleic acid molecule” means that 18, 19, 20, or 21 nucleotides have the indicated property. When at least is present before a series of numbers or a range, it is understood that “at least” can modify each of the numbers in the series or range.

[0125] As used herein, “no more than” or “or less” is understood as the value adjacent to the phrase and logical lower values or integers, as logical from context, to zero. For example, a duplex with an overhang of “no more than 2 nucleotides” has a 2, 1, or 0 nucleotide overhang. When “no more than” is present before a series of numbers or a range, it is understood that “no more than” can modify each of the numbers in the series or range.

[0126] As used herein, the term “at least about”, when referring to a measurable value such as a parameter, an amount, and the like, is meant to encompass variations of +/−20%, preferably +/−10%, more preferably +/−5%, and still more preferably +/−1% from the specified value, insofar such variations are appropriate to perform in the disclosed invention. For example, the inhibition of expression of the LRRK2 gene by “at least about 25%” means that the inhibition of expression of the LRRK2 gene can be measured to be any value +/−20% of the specified 25%, i.e., 20%, 30% or any intermediary value between 20-30%.

[0127] As used herein, “control level” refers to the levels of expression of a gene, or expression level of an RNA molecule or expression level of one or more proteins or protein subunits, in a non-modulated cell, tissue or a system identical to the cell, tissue or a system where the RNAi agents, described herein, are expressed. The cell, tissue or a system where the RNAi agents are expressed, have at least 5%, 10%, 20%, 30%, 40%, 50%, 60%, 70%, 80%, 90%, 100%, 2-fold, 3-fold, 4-fold, 5-fold or more expression of the gene, RNA and/or protein described above from that observed in the absence of the RNAi agent. The % and/or fold difference can be calculated relative to the control levels, for example,

$$\% difference = \frac{[ expression with RNAi agent - expression without RNAi agent ]}{expression without RNAi agent} \times 100$$

[0128] As used herein, methods of detection can include determination that the amount of analyte present is below the level of detection of the method.

[0129] In the event of a conflict between an indicated target site and the nucleotide sequence for a sense or antisense strand, the indicated sequence takes precedence.

[0130] In the event of a conflict between a chemical structure and a chemical name, the chemical structure takes precedence.

[0131] The term “LRRK2” gene, also known as “DRDN,” “RIPK7,” “PARK8,” “AURA17,” “ROCO2”, and “leucine-rich repeat kinase 2,” refers to the gene encoding for a protein called Dardarin. The LRRK2 gene is active in the brain and other tissues throughout the body. LRRK2 is expressed in many regions of the brain, including microglia, oligodendrocytes, neurons and astrocytes. Expression in cells of both the innate and adaptive immune system have also been reported.

[0132] LRRK2 encodes for a protein known as Dardarin, which contains multiple functional domains, including a leucine-rich repeat (LRR) domain, a GTPase domain, a kinase domain, and a WD40 domain. Dardarin likely function as both an active GTPase and kinase. Being a large protein with several different functional and protein-interacting domains, LRRK2 may have different binding partners in different cell types. In support of multiple functions due to multiple protein-interacting domains, LRRK2 has been shown in vitro to influence regulation of autophagy, macroautophagy, ceramide metabolism, neurite outgrowth, vesicular trafficking, cytoskeletal components, and cell signaling pathways involving nuclear factor of activated T cells (NFAT), Wnt, and nuclear factor-κB. One of the domains of the dardarin protein is a leucine-rich region that appear to play a role in activities that require interactions with other proteins, such as transmitting signals or helping to assemble the cell's structural framework (cytoskeleton). Other parts of the Dardarin protein are also thought to be involved in protein-protein interactions. Dardarin has kinase and GTPase activity. Proteins with kinase activity assist in the transfer of a phosphate group (a cluster of oxygen and phosphorus atoms) from the energy molecule ATP to amino acids in certain proteins. This phosphorylation is an essential step in turning on and off many cell activities. Among the kinase substrates of LRRK2 are a subset of the Rab GTPases (guanosine triphosphatases), including Rab10, which has been implicated in the maintenance of endoplasmic reticulum, vesicle trafficking, and autophagy (Eguchi et al., Proc Nat Acad Sci 2018; 15(39) E9115-E9124). LRRK2-induced phosphorylation of Rab10 likely inhibits its function by preventing binding to Rab GDP (guanosine diphosphate) dissociation inhibitor factors necessary for membrane delivery and recycling. Aberrantly enhanced LRRK2 kinase activity has been linked to the reduced activity of Rab10 and its effectors (Maio et al., Science Translational Medicine 25 Jul. 2018: Vol. 10, Issue 451, eaar5429.) The GTPase activity of Dardarin is associated with a region of the protein called the ROC domain. The ROC domain may help control the overall shape of the Dardarin protein. At least 20 different mutations in the LRRK2 gene have been implicated as the cause of inherited and sporadic Parkinson's disease. Missense mutations in LRRK2 cause familial Parkinson's disease. Additionally, genome-wide association studies involving scanning markers across the genomes of many patients with Parkinson's to associate specific genetic variations with Parkinson's point to the LRRK2 locus as a risk factor for Parkinson's. Expression quantitative trait loci (eQTL) analysis to identify genetic variants that affect the expression of one or more genes suggest that the expression of LRRK2 is increased about 2 fold in sporadic Parkinson's disease.

[0133] LRRK2 polymorphisms have been associated with inflammatory bowel disease (e.g., Crohn's disease) and leprosy, demonstrating a link to immune function. Recently, increased expression of LRRK2 in monocytes following IFN-γ stimulation was reported, leading to a possible mechanism of LRRK2 mediated pathophysiology in PD where LRRK2 may play a role as a regulator of inflammatory and immune responses that modulates the risk for neurodegeneration. Although the mechanisms of LRRK2 mediated pathology are still being investigated, increased expression of WT and/or mutated LRRK2 in cells from PD patients, likely causes a dysregulation of function and activation in cells of both the innate and adaptive immune system, resulting in an undesirable inflammatory response and subsequent neurodegeneration in PD. Of note, a large proportion (e.g., about up to 30-40%) of people with IBD go on to develop PD.

[0134] Mutations in the LRRK2 gene have also been associated in more peripheral processes, such as kidney functions, in rats and mice. Although LRRK2 knockout animals have a kidney defect, they are protected against AKI and CKD in rodent models. LRRK2 knockdown in zebrafish is known to cause developmental perturbations such as axis curvature defects, ocular abnormalities, and edema in the eyes, lens, and otic vesicles (Prabhudesai, et al. (2016) Neuroscience Research Vol. 94, Issue 8:717-735) Exemplary nucleotide and amino acid sequences of LRRK2 can be found, for example, at GenBank Accession No. NM_198578.4 (Homo sapiens LRRK2, SEQ ID NO: 1, reverse complement, SEQ ID NO: 2); XM_024448833.1 (Homo sapiens LRRK2 transcript variant X3, SEQ ID NO: 1808, reverse complement, SEQ ID NO: 1809); GenBank Accession No.: XM_015151449.2 (Macaca fascicularis LRRK2, SEQ ID NO: 3, reverse complement, SEQ ID NO: 4); GenBank Accession No. NM_025730.3 (Mus musculus LRRK2, SEQ ID NO: 5; reverse complement, SEQ ID NO: 6); and GenBank Accession No.: NM_001191789.1 (Rattus norvegicus LRRK2, SEQ ID NO: 7, reverse complement, SEQ ID NO: 8).

[0135] The nucleotide sequence of the genomic region of human chromosome harboring the LRRK2 gene may be found in, for example, the Genome Reference Consortium Human Build 38 (also referred to as Human Genome build 38 or GRCh38) available at GenBank. The nucleotide sequence of the genomic region of human chromosome 12 harboring the LRRK2 gene may also be found at, for example, GenBank Accession No. NC_000012.12, corresponding to nucleotides 40196744-40369285 of human chromosome 12. The nucleotide sequence of the human LRRK2 gene may be found in, for example, GenBank Accession No. NG_011709.1

[0136] Further examples of LRRK2 sequences can be found in publically available databases, for example, GenBank, OMIM, and UniProt.

[0137] Additional information on LRRK2 can be found, for example, at the NCBI web site that refers to gene 120892. The term LRRK2 as used herein also refers to variations of the LRRK2 gene including variants provided in the clinical variant database, for example, at the NCBI clinical variants web site that refers to the term NM_198578.4.

[0138] The entire contents of each of the foregoing GenBank Accession numbers and the Gene database numbers are incorporated herein by reference as of the date of filing this application.

[0139] As used herein, “target sequence” refers to a contiguous portion of the nucleotide sequence of an mRNA molecule formed during the transcription of a LRRK2 gene, including both a primary transcription product and a mRNA that is a product of RNA processing of a primary transcription product. In one embodiment, the target portion of the sequence is at least long enough to serve as a substrate for RNAi-directed cleavage at or near that portion of the nucleotide sequence of an mRNA molecule formed during the transcription of a LRRK2 gene.

[0140] The target sequence is about 15-30 nucleotides in length. For example, the target sequence can be from about 15-30 nucleotides, 15-29, 15-28, 15-27, 15-26, 15-25, 15-24, 15-23, 15-22, 15-21, 15-20, 15-19, 15-18, 15-17, 18-30, 18-29, 18-28, 18-27, 18-26, 18-25, 18-24, 18-23, 18-22, 18-21, 18-20, 19-30, 19-29, 19-28, 19-27, 19-26, 19-25, 19-24, 19-23, 19-22, 19-21, 19-20, 20-30, 20-29, 20-28, 20-27, 20-26, 20-25, 20-24,20-23, 20-22, 20-21, 21-30, 21-29, 21-28, 21-27, 21-26, 21-25, 21-24, 21-23, or 21-22 nucleotides in length. In certain embodiments, the target sequence is 19-23 nucleotides in length, optionally 21-23 nucleotides in length. Ranges and lengths intermediate to the above recited ranges and lengths are also contemplated to be part of the disclosure.

[0141] As used herein, the term “strand comprising a sequence” refers to an oligonucleotide comprising a chain of nucleotides that is described by the sequence referred to using the standard nucleotide nomenclature. “G,” “C,” “A,” “T”, and “U” each generally stand for a nucleotide that contains guanine, cytosine, adenine, thymidine, and uracil as a base, respectively in the context of a modified or unmodified nucleotide. However, it will be understood that the term “ribonucleotide” or “nucleotide” can also refer to a modified nucleotide, as further detailed below, or a surrogate replacement moiety (see, e.g., Table 2). The skilled person is well aware that guanine, cytosine, adenine, thymidine, and uracil can be replaced by other moieties without substantially altering the base pairing properties of an oligonucleotide comprising a nucleotide bearing such replacement moiety. For example, without limitation, a nucleotide comprising inosine as its base can base pair with nucleotides containing adenine, cytosine, or uracil. Hence, nucleotides containing uracil, guanine, or adenine can be replaced in the nucleotide sequences of dsRNA featured in the disclosure by a nucleotide containing, for example, inosine. In another example, adenine and cytosine anywhere in the oligonucleotide can be replaced with guanine and uracil, respectively to form G-U Wobble base pairing with the target mRNA. Sequences containing such replacement moieties are suitable for the compositions and methods featured in the disclosure.

[0142] The terms “iRNA”, “RNAi agent,” “iRNA agent,” “RNA interference agent” as used interchangeably herein, refer to an agent that contains RNA as that term is defined herein, and which mediates the targeted cleavage of an RNA transcript via an RNA-induced silencing complex (RISC) pathway. RNA interference (RNAi) is a process that directs the sequence-specific degradation of mRNA.

[0143] RNAi modulates, e.g., inhibits, the expression of LRRK2 in a cell, e.g., a cell within a subject, such as a mammalian subject.

[0144] In one embodiment, an RNAi agent of the disclosure includes a single stranded RNAi that interacts with a target RNA sequence, e.g., a LRRK2 target mRNA sequence, to direct the cleavage of the target RNA. Without wishing to be bound by theory it is believed that long double stranded RNA introduced into cells is broken down into double-stranded short interfering RNAs (siRNAs) comprising a sense strand and an antisense strand by a Type III endonuclease known as Dicer (Sharp et al. (2001) Genes Dev. 15:485). Dicer, a ribonuclease-III-like enzyme, processes this dsRNA into 19-23 base pair short interfering RNAs with characteristic two base 3′ overhangs (Bernstein, et al. (2001) Nature 409:363). These siRNAs are then incorporated into an RNA-induced silencing complex (RISC) where one or more helicases unwind the siRNA duplex, enabling the complementary antisense strand to guide target recognition (Nykanen, et al., (2001) Cell 107:309). Upon binding to the appropriate target mRNA, one or more endonucleases within the RISC cleave the target to induce silencing (Elbashir, et al., (2001) Genes Dev. 15:188). Thus, in one aspect the disclosure relates to a single stranded RNA (ssRNA) (the antisense strand of a siRNA duplex) generated within a cell and which promotes the formation of a RISC complex to effect silencing of the target gene, i.e., a LRRK2 gene. Accordingly, the term “siRNA” is also used herein to refer to an RNAi as described above.

[0145] In another embodiment, the RNAi agent may be a single-stranded RNA that is introduced into a cell or organism to inhibit a target mRNA. Single-stranded RNAi agents bind to the RISC endonuclease, Argonaute 2, which then cleaves the target mRNA. The single-stranded siRNAs are generally 15-30 nucleotides and are chemically modified. The design and testing of single-stranded RNAs are described in U.S. Pat. No. 8,101,348 and in Lima et al., (2012) Cell 150:883-894, the entire contents of each of which are hereby incorporated herein by reference. Any of the antisense nucleotide sequences described herein may be used as a single-stranded siRNA as described herein or as chemically modified by the methods described in Lima et al., (2012) Cell 150:883-894.

[0146] In another embodiment, a “RNAi agent” for use in the compositions and methods of the disclosure is a double stranded RNA and is referred to herein as a “double stranded RNAi agent,” “double stranded RNA (dsRNA) molecule,” “dsRNA agent,” or “dsRNA”. The term “dsRNA” refers to a complex of ribonucleic acid molecules, having a duplex structure comprising two anti-parallel and substantially complementary nucleic acid strands, referred to as having “sense” and “antisense” orientations with respect to a target RNA, i.e., a LRRK2 gene. In some embodiments of the disclosure, a double stranded RNA (dsRNA) triggers the degradation of a target RNA, e.g., an mRNA, through a post-transcriptional gene-silencing mechanism referred to herein as RNA interference or RNAi.

[0147] In general, a dsRNA molecule can include ribonucleotides, but as described in detail herein, each or both strands can also include one or more non-ribonucleotides, e.g., a deoxyribonucleotide, a modified nucleotide. In addition, as used in this specification, an “RNAi agent” may include ribonucleotides with chemical modifications; an RNAi agent may include substantial modifications at multiple nucleotides. As used herein, the term “modified nucleotide” refers to a nucleotide having, independently, a modified sugar moiety, a modified internucleotide linkage, or a modified nucleobase. Thus, the term modified nucleotide encompasses substitutions, additions or removal of, e.g., a functional group or atom, to internucleoside linkages, sugar moieties, or nucleobases. The modifications suitable for use in the agents of the disclosure include all types of modifications disclosed herein or known in the art. Any such modifications, as used in a siRNA type molecule, are encompassed by “RNAi agent” for the purposes of this specification and claims.

[0148] In certain embodiments of the instant disclosure, inclusion of a deoxy-nucleotide if present within an RNAi agent can be considered to constitute a modified nucleotide.

[0149] The duplex region may be of any length that permits specific degradation of a desired target RNA through a RISC pathway, and may range from about 15-36 base pairs in length, for example, about 15, 16, 17, 18, 19, 20, 21, 22, 23, 24, 25, 26, 27, 28, 29, 30, 31, 32, 33, 34, 35, or 36 base pairs in length, such as about 15-30, 15-29, 15-28, 15-27, 15-26, 15-25, 15-24, 15-23, 15-22, 15-21, 15-20, 15-19, 15-18, 15-17, 18-30, 18-29, 18-28, 18-27, 18-26, 18-25, 18-24, 18-23, 18-22, 18-21, 18-20, 19-30, 19-29, 19-28, 19-27, 19-26, 19-25, 19-24, 19-23, 19-22, 19-21, 19-20, 20-30, 20-29, 20-28, 20-27, 20-26, 20-25, 20-24,20-23, 20-22, 20-21, 21-30, 21-29, 21-28, 21-27, 21-26, 21-25, 21-24, 21-23, or 21-22 base pairs in length. In certain embodiments, the duplex region is 19-21 base pairs in length, e.g., 21 base pairs in length. Ranges and lengths intermediate to the above recited ranges and lengths are also contemplated to be part of the disclosure.

[0150] The two strands forming the duplex structure may be different portions of one larger RNA molecule, or they may be separate RNA molecules. Where the two strands are part of one larger molecule, they may be connected by an uninterrupted chain of nucleotides between the 3′-end of one strand and the 5′-end of the respective other strand forming the duplex structure, with the connecting RNA chain is referred to as a “hairpin loop.” A hairpin loop can comprise at least one unpaired nucleotide. In some embodiments, the hairpin loop can comprise at least 4, at least 5, at least 6, at least 7, at least 8, at least 9, at least 10, at least 20, at least 23 or more unpaired nucleotides or nucleotides not directed to the target site of the dsRNA. In some embodiments, the hairpin loop can be 10 or fewer nucleotides. In some embodiments, the hairpin loop can be 8 or fewer unpaired nucleotides. In some embodiments, the hairpin loop can be 4-10 unpaired nucleotides. In some embodiments, the hairpin loop can be 4-8 nucleotides.

[0151] Where the two substantially complementary strands of a dsRNA are comprised by separate RNA molecules, those molecules need not, but can be covalently connected. In certain embodiments where the two strands are connected covalently by means other than an uninterrupted chain of nucleotides between the 3′-end of one strand and the 5′-end of the respective other strand forming the duplex structure, the connecting structure is referred to as a “linker” (though it is noted that certain other structures defined elsewhere herein can also be referred to as a “linker”). The RNA strands may have the same or a different number of nucleotides. The maximum number of base pairs is the number of nucleotides in the shortest strand of the dsRNA minus any overhangs that are present in the duplex. In addition to the duplex structure, an RNAi may comprise one or more nucleotide overhangs. In one embodiment of the RNAi agent, at least one strand comprises a 3′ overhang of at least 1 nucleotide. In another embodiment, at least one strand comprises a 3′ overhang of at least 2 nucleotides, e.g., 2, 3, 4, 5, 6, 7, 9, 10, 11, 12, 13, 14, or 15 nucleotides. In other embodiments, at least one strand of the RNAi agent comprises a 5′ overhang of at least 1 nucleotide. In certain embodiments, at least one strand comprises a 5′ overhang of at least 2 nucleotides, e.g., 2, 3, 4, 5, 6, 7, 9, 10, 11, 12, 13, 14, or 15 nucleotides. In still other embodiments, both the 3′ and the 5′ end of one strand of the RNAi agent comprise an overhang of at least 1 nucleotide.

[0152] In one embodiment, an RNAi agent of the disclosure is a dsRNA, each strand of which independently comprises 19-23 nucleotides, that interacts with a target RNA sequence, e.g., a LRRK2 target mRNA sequence, to direct the cleavage of the target RNA.

[0153] In some embodiments, an iRNA of the invention is a dsRNA of 24-30 nucleotides that interacts with a target RNA sequence, e.g., a LRRK2 target mRNA sequence, to direct the cleavage of the target RNA.

[0154] As used herein, the term “nucleotide overhang” refers to at least one unpaired nucleotide that protrudes from the duplex structure of an RNAi agent, e.g., a dsRNA. For example, when a 3′-end of one strand of a dsRNA extends beyond the 5′-end of the other strand, or vice versa, there is a nucleotide overhang. A dsRNA can comprise an overhang of at least one nucleotide; alternatively, the overhang can comprise at least two nucleotides, at least three nucleotides, at least four nucleotides, at least five nucleotides or more. A nucleotide overhang can comprise or consist of a nucleotide/nucleoside analog, including a deoxynucleotide/nucleoside. The overhang(s) can be on the sense strand, the antisense strand or any combination thereof. Furthermore, the nucleotide(s) of an overhang can be present on the 5′-end, 3′-end or both ends of either an antisense or sense strand of a dsRNA.

[0155] In one embodiment, the antisense strand of a dsRNA has a 1-10 nucleotides, e.g., a 1, 2, 3, 4, 5, 6, 7, 8, 9, or 10 nucleotides, overhang at the 3′-end or the 5′-end. In one embodiment, the sense strand of a dsRNA has a 1-10 nucleotide, e.g., a 1, 2, 3, 4, 5, 6, 7, 8, 9, or 10 nucleotides, overhang at the 3′-end or the 5′-end. In another embodiment, one or more of the nucleotides in the overhang is replaced with a nucleoside thiophosphate.

[0156] In certain embodiments, the antisense strand of a dsRNA has a 1-10 nucleotide, e.g., 0-3, 1-3, 2-4, 2-5, 4-10, 5-10, e.g., a 1, 2, 3, 4, 5, 6, 7, 8, 9, or 10 nucleotides, overhang at the 3′-end or the 5′-end. In one embodiment, the sense strand of a dsRNA has a 1-10 nucleotide, e.g., a 1, 2, 3, 4, 5, 6, 7, 8, 9, or 10 nucleotides, overhang at the 3′-end or the 5′-end. In another embodiment, one or more of the nucleotides in the overhang is replaced with a nucleoside thiophosphate.

[0157] In certain embodiments, the overhang on the sense strand or the antisense strand, can include extended lengths longer than 10 nucleotides, e.g., 1-30 nucleotides, 2-30 nucleotides, 10-30 nucleotides, or 10-15 nucleotides in length. In certain embodiments, an extended overhang is on the sense strand of the duplex. In certain embodiments, an extended overhang is present on the 3′end of the sense strand of the duplex. In certain embodiments, an extended overhang is present on the 5′end of the sense strand of the duplex. In certain embodiments, an extended overhang is on the antisense strand of the duplex. In certain embodiments, an extended overhang is present on the 3′end of the antisense strand of the duplex. In certain embodiments, an extended overhang is present on the 5′end of the antisense strand of the duplex. In certain embodiments, one or more of the nucleotides in the overhang is replaced with a nucleoside thiophosphate. In certain embodiments, the overhang includes a self-complementary portion such that the overhang is capable of forming a hairpin structure that is stable under physiological conditions.

[0158] The terms “blunt” or “blunt ended” as used herein in reference to a dsRNA mean that there are no unpaired nucleotides or nucleotide analogs at a given terminal end of a dsRNA, i.e., no nucleotide overhang.

[0159] One or both ends of a dsRNA can be blunt. Where both ends of a dsRNA are blunt, the dsRNA is said to be blunt ended. To be clear, a “blunt ended” dsRNA is a dsRNA that is blunt at both ends, i.e., no nucleotide overhang at either end of the molecule. Most often such a molecule is double stranded over its entire length.

[0160] The term “antisense strand” or “guide strand” refers to the strand of an RNAi agent, e.g., a dsRNA, which includes a region that is substantially complementary to a target sequence, e.g., a LRRK2 mRNA.

[0161] As used herein, the term “region of complementarity” refers to the region on the antisense strand that is substantially complementary to a sequence, for example a target sequence, e.g., a LRRK2 nucleotide sequence, as defined herein. Where the region of complementarity is not fully complementary to the target sequence, the mismatches can be in the internal or terminal regions of the molecule. Generally, the most tolerated mismatches are in the terminal regions, e.g., within 5, 4, 3, or 2 nucleotides of the 5′- or 3′-terminus of the RNAi agent. In some embodiments, a double stranded RNA agent of the invention includes a nucleotide mismatch in the antisense strand. In some embodiments, the antisense strand of the double stranded RNA agent of the invention includes no more than 4 mismatches with the target mRNA, e.g., the antisense strand includes 4, 3, 2, 1, or 0 mismatches with the target mRNA. In some embodiments, the antisense strand double stranded RNA agent of the invention includes no more than 4 mismatches with the sense strand, e.g., the antisense strand includes 4, 3, 2, 1, or 0 mismatches with the sense strand. In some embodiments, a double stranded RNA agent of the invention includes a nucleotide mismatch in the sense strand. In some embodiments, the sense strand of the double stranded RNA agent of the invention includes no more than 4 mismatches with the antisense strand, e.g., the sense strand includes 4, 3, 2, 1, or 0 mismatches with the antisense strand. In some embodiments, the nucleotide mismatch is, for example, within 5,4,3 nucleotides from the 3′-end of the iRNA. In another embodiment, the nucleotide mismatch is, for example, in the 3′-terminal nucleotide of the iRNA agent. In some embodiments, the mismatch(s) is not in the seed region.

[0162] Thus, an RNAi agent as described herein can contain one or more mismatches to the target sequence.

[0163] In one embodiment, an RNAi agent as described herein contains no more than 3 mismatches (i.e., 3, 2, 1, or 0 mismatches). In one embodiment, an RNAi agent as described herein contains no more than 2 mismatches.

[0164] In one embodiment, an RNAi agent as described herein contains no more than 1 mismatch. In one embodiment, an RNAi agent as described herein contains 0 mismatches. In certain embodiments, when the antisense strand of the RNAi agent contains mismatches to the target sequence, then the mismatch can optionally be restricted to be within the last 5 nucleotides from either the 5′- or 3′-end of the region of complementarity. For example, in such embodiments, for a 23 nucleotide RNAi agent, the strand which is complementary to a region of a LRRK2 gene, generally does not contain any mismatch within the central 13 nucleotides. The methods described herein or methods known in the art can be used to determine whether an RNAi agent containing a mismatch to a target sequence is effective in inhibiting the expression of a LRRK2 gene. For example, Jackson et al. (Nat. Biotechnol. 2003; 21: 635-637) described an expression profile study where the expression of a small set of genes with sequence identity to the MAPK14 siRNA only at 12-18 nt of the sense strand, was down-regulated with similar kinetics to MAPK14. Similarly, Lin et al., (Nucleic Acids Res. 2005; 33(14): 4527-4535) using qPCR and reporter assays, showed that a 7 nt complementation between a siRNA and a target is sufficient to cause mRNA degradation of the target. Consideration of the efficacy of RNAi agents with mismatches in inhibiting expression of a LRRK2 gene is important, especially if the particular region of complementarity in a LRRK2 gene is known to have polymorphic sequence variation within the population.

[0165] As used herein, “substantially all of the nucleotides are modified” are largely but not wholly modified and can include not more than 5, 4, 3, 2, or 1 unmodified nucleotide.

[0166] The term “sense strand” or “passenger strand” as used herein, refers to the strand of an RNAi agent that includes a region that is substantially complementary to a region of the antisense strand as that term is defined herein.

[0167] As used herein, the term “cleavage region” refers to a region that is located immediately adjacent to the cleavage site. The cleavage site is the site on the target at which cleavage occurs. In some embodiments, the cleavage region comprises three bases on either end of, and immediately adjacent to, the cleavage site. In some embodiments, the cleavage region comprises two bases on either end of, and immediately adjacent to, the cleavage site. In some embodiments, the cleavage site specifically occurs at the site bound by nucleotides 10 and 11 of the antisense strand, and the cleavage region comprises nucleotides 11, 12 and 13.

[0168] As used herein, and unless otherwise indicated, the term “complementary,” when used to describe a first nucleotide sequence in relation to a second nucleotide sequence, refers to the ability of an oligonucleotide or polynucleotide comprising the first nucleotide sequence to hybridize and form a duplex structure under certain conditions with an oligonucleotide or polynucleotide comprising the second nucleotide sequence, as will be understood by the skilled person. Such conditions can be, for example, “stringent conditions”, including but not limited to, 400 mM NaCl, 40 mM PIPES pH 6.4, 1 mM EDTA, 50° C. or 70° C. for 12-16 hours followed by washing (see, e.g., “Molecular Cloning: A Laboratory Manual, Sambrook, et al. (1989) Cold Spring Harbor Laboratory Press). As used herein, “stringent conditions” or “stringent hybridization conditions” refers to conditions under which an antisense compound hybridizes to its target sequence, but to a minimal number of other sequences. Stringent conditions are sequence-dependent and are different in different circumstances, and “stringent conditions” under which antisense compounds hybridize to a target sequence are determined by the nature and composition of the antisense compounds and the assays in which they are being investigated. Other conditions, such as physiologically relevant conditions as can be encountered inside an organism, can apply. The skilled person can determine the set of conditions most appropriate for a test of complementarity of two sequences in accordance with the ultimate application of the hybridized nucleotides.

[0169] Complementary sequences within an RNAi agent, e.g., within a dsRNA as described herein, include base-pairing of the oligonucleotide or polynucleotide comprising a first nucleotide sequence to an oligonucleotide or polynucleotide comprising a second nucleotide sequence over the entire length of one or both nucleotide sequences. Such sequences can be referred to as “fully complementary” with respect to each other herein. However, where a first sequence is referred to as “substantially complementary” with respect to a second sequence herein, the two sequences can be fully complementary, or they can form one or more, but generally not more than 5, 4, 3 or 2 mismatched base pairs upon hybridization for a duplex up to 30 base pairs. In some embodiments, the “substantially complementary” sequences disclosed herein comprise a contiguous nucleotide sequence which is at least about 80% complementary over its entire length to the equivalent region of the target LRRK2 sequence, such as about 85%, about 90%, about 91%, about 92%, about 93%, about 94%, about 95%, about 96%, about 97%, about 98%, or about 99% complementary. However, where two oligonucleotides are designed to form, upon hybridization, one or more single stranded overhangs, such overhangs shall not be regarded as mismatches with regard to the determination of complementarity. For example, a dsRNA comprising one oligonucleotide 21 nucleotides in length and another oligonucleotide 23 nucleotides in length, wherein the longer oligonucleotide comprises a sequence of 21 nucleotides that is fully complementary to the shorter oligonucleotide, can yet be referred to as “fully complementary” for the purposes described herein.

[0170] “Complementary” sequences, as used herein, can also include, or be formed entirely from, non-Watson-Crick base pairs or base pairs formed from non-natural and modified nucleotides, in so far as the above requirements with respect to their ability to hybridize are fulfilled. Such non-Watson-Crick base pairs include, but are not limited to, G:U Wobble or Hoogsteen base pairing.

[0171] The terms “complementary,” “fully complementary” and “substantially complementary” herein can be used with respect to the base matching between two oligonucleotides or polynucleotides, such as the sense strand and the antisense strand of a dsRNA, or between the antisense strand of an RNAi agent and a target sequence, as is understood from the context of their use.

[0172] As used herein, a polynucleotide that is “substantially complementary to at least part of” a messenger RNA (mRNA) refers to a polynucleotide that is substantially complementary to a contiguous portion of the mRNA of interest (e.g., an mRNA encoding LRRK2). For example, a polynucleotide is complementary to at least a part of a LRRK2 mRNA if the sequence is substantially complementary to a non-interrupted portion of an mRNA encoding LRRK2.

[0173] Accordingly, in some embodiments, the antisense polynucleotides disclosed herein are fully complementary to the target LRRK2 sequence. In other embodiments, the antisense polynucleotides disclosed herein are substantially complementary to the target LRRK2 sequence and comprise a contiguous nucleotide sequence which is at least 80% complementary over its entire length to the equivalent region of the nucleotide sequence of any one of SEQ ID NOs:1, 3, 5, 7 and 1808, or a fragment of any one of SEQ ID NOs: 1, 3, 5, 7 and 1808, such as about 85%, about 90%, about 91%, about 92%, about 93%, about 94%, about 95%, about 96%, about 97%, about 98%, or about 99% complementary.

[0174] In some embodiments, the antisense polynucleotides disclosed herein are substantially complementary to a fragment of a target LRRK2 sequence and comprise a contiguous nucleotide sequence which is at least 80% complementary over its entire length to a fragment of SEQ ID NO: 1 selected from the group of nucleotides 1458-1478, 1484-1504, 1761-1781, 1950-1970, 2076-2096, 2094-2114, 2212-2232, 2213-2233, 2268-2288, 2431-2451, 2529-2549, 2565-2585, 2566-2586, 2569-2589, 2583-2603, 2605-2625, 2657-2677, 2764-2784, 2867-2887, 2881-2901, 2883-2903, 3022-3042, 3198-3218, 3330-3350, 3348-3368, 3395-3415, 3629-3649, 3630-3650, 3712-3732, 3713-3733, 3715-3735, 3717-3737, 3720-3740, 3727-3747, 3796-3816, 3800-3820, 3822-3842, 3829-3849, 3875-3895, 3971-3991, 4130-4150, 4443-4463, 4447-4467, 4449-4469, 4478-4498, 4488-4508, 4619-4639, 4652-4672, 4868-4888, 4950-4970, 4970-4990, 4971-4991, 4972-4992, 5092-5112, 5202-5222, 5226-5246, 5232-5252, 5233-5253, 5273-5293, 5318-5338, 5367-5387, 5368-5388, 5370-5390, 5373-5393, 5425-5445, 5443-5463, 5457-5477, 5461-5481, 5471-5491, 5475-5495, 5501-5521, 5557-5577, 5640-5660, 5646-5666, 5659-5679, 5674-5694, 5675-5695, 5676-5696, 5682-5702, 5684-5704, 5722-5742, 5725-5745, 5778-5798, 5779-5799, 5793-5813, 5964-5984, 5965-5985, 5984-6004, 6029-6049, 6092-6112, 6093-6113, 6094-6114, 6096-6116, 6127-6147, 6143-6163, 6165-6185, 6172-6192, 6173-6193, 6174-6194, 6175-6195, 6198-6218, 6319-6339, 6339-6359, 6418-6438, 6531-6551, 6536-6556, 6541-6561, 6573-6593, 6662-6682, 6730-6750, 6740-6760, 6742-6762, 6786-6806, 6791-6811, 6803-6823, 6804-6824, 6805-6825, 6807-6827, 6810-6830, 6811-6831, 6812-6832, 6818-6838, 6872-6892, 7004-7024, 7018-7038, 7020-7040, 7027-7047,7028-7048, 7085-7105, 7103-7123, 7115-7135, 7121-7141, 7127-7147, 7242-7262, 7348-7368, 7397-7417, 7404-7424, 7405-7425, 7421-7441, 7443-7463, 7444-7464, 7445-7465, 7493-7513, 7535-7555, 7538-7558, 7539-7559, 7593-7613, 7629-7649, 7637-7657, 7638-7658, 7639-7659, 7671-7691, 7727-7747, 7729-7749, 8134-8154, 8135-8155, 1484-1504, 1488-1508, 1755-1775, 1761-1781, 1905-1925, 1945-1965, 1950-1970, 2029-2049, 2207-2227, 2212-2232, 2213-2233, 2431-2451, 2529-2549, 2565-2585, 2569-2589, 2648-2668, 2764-2784, 2874-2894,2881-2901, 3051-3071, 3193-3213, 3198-3218, 3208-3228, 3330-3350, 3331-3351, 3350-3370, 3380-3400, 3390-3410, 3395-3415, 3573-3593, 3622-3642, 3632-3652, 3712-3732, 3715-3735, 3717-3737, 3718-3738, 3740-3760, 3795-3815, 3806-3826, 3829-3849, 3830-3850, 3938-3958, 3950-3970, 3971-3991, 4367-4387, 4376-4396, 4444-4464, 4446-4466, 4447-4467, 4551-4571, 4554-4574, 4704-4724, 4834-4854, 4839-4859, 4925-4945, 4970-4990, 4971-4991, 4972-4992, 5058-5078, 5092-5112, 5128-5148, 5196-5216, 5226-5246, 5275-5295, 5322-5342, 5349-5369, 5352-5372, 5365-5385, 5367-5387, 5368-5388, 5370-5390, 5373-5393, 5461-5481, 5475-5495, 5482-5502, 5515-5535, 5516-5536, 5541-5561, 5557-5577, 5607-5627, 5635-5655, 5641-5661, 5643-5663, 5644-5664, 5646-5666, 5655-5675, 5659-5679, 5660-5680, 5671-5691, 5674-5694, 5682-5702, 5683-5703, 5684-5704, 5721-5741, 5757-5777, 5763-5783, 5772-5792, 5773-5793, 5776-5796, 5777-5797, 5778-5798, 5779-5799, 5793-5813, 5794-5814, 5964-5984, 5965-5985, 5966-5986, 5980-6000, 5984-6004, 6029-6049, 6030-6050, 6071-6091, 6092-6112, 6093-6113, 6095-6115, 6129-6149, 6135-6155, 6136-6156,6142-6162, 6145-6165, 6171-6191, 6172-6192, 6174-6194, 6175-6195, 6178-6198, 6180-6200, 6196-6216, 6197-6217, 6198-6218, 6344-6364, 6355-6375, 6520-6540, 6536-6556, 6538-6558, 6539-6559, 6541-6561, 6723-6743, 6724-6744, 6729-6749, 6730-6750, 6737-6757, 6740-6760, 6742-6762, 6743-6763, 6786-6806, 6787-6807, 6791-6811, 6793-6813, 6794-6814, 6803-6823, 6805-6825, 6806-6826, 6807-6827, 6808-6828, 6810-6830, 6811-6831, 6812-6832, 6813-6833, 6814-6834, 6818-6838, 6828-6848, 6829-6849, 6834-6854, 6872-6892, 6918-6938, 6919-6939, 6920-6940, 6922-6942, 6989-7009, 7004-7024, 7012-7032, 7023-7043, 7035-7055, 7036-7056, 7041-7061, 7085-7105, 7103-7123, 7114-7134, 7116-7136, 7121-7141, 7129-7149, 7146-7166, 7149-7169, 7242-7262, 7247-7267, 7303-7323, 7348-7368, 7353-7373, 7397-7417, 7404-7424, 7405-7425, 7443-7463, 7493-7513, 7533-7553, 7538-7558, 7539-7559, 7593-7613, 7627-7647, 7629-7649, 7727-7747, 8005-8025, 8007-8027 and 8134-8154 of SEQ ID NO: 1, such as about 85%, about 90%, about 91%, about 92%, about 93%, about 94%, about 95%, about 96%, about 97%, about 98%, or about 99% complementary. Ranges intermediate to the above recited ranges are also contemplated to be part of the disclosure.

[0175] In some embodiments, the antisense polynucleotides disclosed herein are substantially complementary to a fragment of a target LRRK2 sequence and comprise a contiguous nucleotide sequence which is at least 80% complementary over its entire length to a fragment of SEQ ID NO: 1808 selected from the group of nucleotides 212-232, 238-258, 515-535, 704-724, 830-850, 848-868, 966-986, 967-987, 1022-1042, 1185-1205, 1283-1303, 1319-1339, 1320-1340, 1323-1343, 1337-1357, 1359-1379, 1411-1431, 1518-1538, 1621-1641, 1635-1655, 1637-1657, 1776-1796, 1952-1972, 2084-2104, 2102-2122, 2149-2169, 2383-2403, 2384-2404, 2466-2486, 2467-2487, 2469-2489, 2471-2491, 2474-2494, 2481-2501, 2550-2570, 2554-2574, 2576-2596, 2583-2603, 2629-2649, 2725-2745, 2884-2904, 3197-3217, 3201-3221, 3203-3223, 3232-3252, 3242-3262, 3373-3393, 3406-3426, 3622-3642, 3704-3724, 3724-3744, 3725-3745, 3726-3746, 3846-3866, 3956-3976, 3980-4000, 3986-4006, 3987-4007, 4027-4047, 4072-4092, 4121-4141, 4122-4142, 4124-4144, 4127-4147, 4179-4199, 4197-4217, 4211-4231, 4215-4235, 4225-4245, 4229-4249, 4255-4275, 4311-4331, 4394-4414, 4400-4420, 4413-4433, 4428-4448, 4429-4449, 4430-4450, 4436-4456, 4438-4458, 4476-4496, 4479-4499, 4532-4552, 4533-4553, 4547-4567, 4718-4738, 4719-4739, 4738-4758, 4783-4803, 4846-4866, 4847-4867, 4848-4868, 4850-4870, 4881-4901, 4897-4917, 4919-4939, 4926-4946, 4927-4947, 4928-4948, 4929-4949, 4952-4972, 5073-5093, 5093-5113, 5172-5192, 5285-5305, 5290-5310, 5295-5315, 5327-5347, 5416-5436, 5484-5504, 5494-5514, 5496-5516, 5540-5560, 5545-5565, 5557-5577, 5558-5578, 5559-5579, 5561-5581, 5564-5584, 5565-5585, 5566-5586, 5572-5592, 5626-5646, 5758-5778, 5772-5792, 5774-5794, 5781-5801, 5782-5802, 5839-5859, 5857-5877, 5869-5889, 5875-5895, 5881-5901, 5996-6016, 6102-6122,6151-6171, 6158-6178, 6159-6179, 6175-6195, 6197-6217, 6198-6218, 6199-6219, 6247-6267, 6289-6309, 6292-6312, 6293-6313, 6347-6367, 6383-6403, 6391-6411, 6392-6412, 6393-6413, 6425-6445, 6481-6501, 6483-6503, 6888-6908 and 6889-6909 of SEQ ID NO: 1808, such as about 85%, about 90%, about 91%, about 92%, about 93%, about 94%, about 95%, about 96%, about 97%, about 98%, or about 99% complementary. Ranges intermediate to the above recited ranges are also contemplated to be part of the disclosure.

[0176] In other embodiments, the antisense polynucleotides disclosed herein are substantially complementary to the target LRRK2 sequence and comprise a contiguous nucleotide sequence which is at least about 80% complementary over its entire length to any one of the sense strand nucleotide sequences in any one of any one of Tables 3-7, or a fragment of any one of the sense strand nucleotide sequences in any one of Tables 3-7, such as about 85%, about 90%, about 91%, about 92%, about 93%, about 94%, about 95%, about 96%, about 97%, about 98%, about 99%, or 100% complementary.

[0177] In one embodiment, an RNAi agent of the disclosure includes a sense strand that is substantially complementary to an antisense polynucleotide which, in turn, is the same as a target LRRK2 sequence, and wherein the sense strand polynucleotide comprises a contiguous nucleotide sequence which is at least about 80% complementary over its entire length to the equivalent region of the nucleotide sequence of SEQ ID NOs: 1, 3, 5, 7 and 1808, or a fragment of any one of SEQ ID NOs: 1, 3, 5, 7 and 1808, such as about 85%, about 90%, about 91%, about 92%, about 93%, about 94%, about 95%, about 96%, about 97%, about 98%, about 99%, or 100% complementary.

[0178] In some embodiments, an iRNA of the invention includes a sense strand that is substantially complementary to an antisense polynucleotide which, in turn, is complementary to a target LRRK2 sequence, and wherein the sense strand polynucleotide comprises a contiguous nucleotide sequence which is at least about 80% complementary over its entire length to any one of the antisense strand nucleotide sequences in any one of any one of Tables 3-7, or a fragment of any one of the antisense strand nucleotide sequences in any one of Tables 3-7, such as about 85%, about 90%, about 91%, about 92%, about 93%, about 94%, about 95%, about 96%, about 97%, about 98%, about 99%, or 100% complementary.

[0179] In certain embodiments, the sense and antisense strands are selected from any one of duplexes AD-1624152, AD-1624178, AD-1624412, AD-1624595, AD-1624721, AD-1624739, AD-1624856, AD-1624857, AD-1624894, AD-1625057, AD-1625155, AD-1625191, AD-1625192, AD-1625195, AD-1625209, AD-1625230, AD-1625282, AD-1625389, AD-1625485, AD-1625499, AD-1625501, AD-1625610, AD-1625786, AD-1625910, AD-1625928, AD-1625975, AD-1626183, AD-1626184, AD-1626265, AD-1626266, AD-1626268, AD-1626270, AD-1626273, AD-1626280, AD-1626349, AD-1626353, AD-1626375, AD-1626382, AD-1626428, AD-1626524, AD-1626636, AD-1626921, AD-1626925, AD-1626927, AD-1626936, AD-1626946, AD-1627077, AD-1627110, AD-1627308, AD-1627390, AD-1627410, AD-1627411, AD-1627412, AD-1627511, AD, 1627601, AD-1627625, AD-1627631, AD-1627632, AD-1627672, AD-1627717, AD-1627766, AD-1627767, AD-1627769, AD-1627772, AD-1627820, AD-1627838, AD-1627852, AD-1627856, AD-1627866, AD-1627870, AD-1627896, AD-1627952, AD-1628008, AD-1628014, AD-1628027, AD-1628042, AD-1628043, AD-1628044, AD-1628050, AD-1628052, AD-1628070, AD-1628073, AD-1628118, AD-1628119, AD-1628133, AD-1628253, AD-1628254, AD-1628273, AD-1628318, AD-1628381, AD-1628382, AD-1628383, AD-1628385, AD-1628396, AD-1628412, AD-1628434, AD-1628441, AD-1628442, AD-1628443, AD-1628444, AD-1628467, AD-1628570, AD-1628590, AD-1628668, AD-1628754, AD-1628759, AD-1628764, AD-1628794, AD-1628883, AD-1628951, AD-1628961, AD-1628963, AD-1629007, AD-1629012, AD-1629024, AD-1629025, AD-1629026, AD-1629028, AD-1629031, AD-1629032, AD-1629033, AD-1629039, AD-1629092, AD-1629200, AD-1629214, AD-1629216, AD-1629223, AD-1629224, AD-1629263, AD-1629280, AD-1629292, AD-1629298, AD-1629304, AD-1629419, AD-1629524, AD-1629573, AD-1629580, AD-1629581, AD-1629597, AD-1629619, AD-1629620, AD-1629621, AD-1629665, AD-1629707, AD-1629710, AD-1629711, AD-1629763, AD-1629799, AD-1629807, AD-1629808, AD-1629809, AD-1629838, AD-1629876, AD-1629878, AD-1630135, AD-1630136, AD-1631019, AD-1631020, AD-1631021, AD-1631022, AD-1631023, AD-1631024, AD-1631025, AD-1631026, AD-1631027, AD-1631028, AD-1631029, AD-1631030, AD-1631031, AD-1631032, AD-1631033, AD-1631034, AD-1631035, AD-1631036, AD-1631037, AD-1631038, AD-1631039, AD-1631040, AD-1631041, AD-1631042, AD-1631043, AD-1631044, AD-1631045, AD-1631046, AD-1631047, AD-1631048, AD-1631049, AD-1631050, AD-1631051, AD-1631052, AD-1631053, AD-1631054, AD-1631055, AD-1631056, AD-1631057, AD-1631058, AD-1631059, AD-1631060, AD-1631061, AD-1631062, AD-1631063, AD-1631064, AD-1631065, AD-1631066, AD-1631067, AD-1631068, AD-1631069, AD-1631070, AD-1631071, AD-1631072, AD-1631073, AD-1631074, AD-1631075, AD-1631076, AD-1631077, AD-1631078, AD-1631079, AD-1631080, AD-1631081, AD-1631082, AD-1631083, AD-1631084, AD-1631085, AD-1631086, AD-1631087, AD-1631088, AD-1631089, AD-1631090, AD-1631091, AD-1631092, AD-1631093, AD-1631094, AD-1631095, AD-1631096, AD-1631097, AD-1631098, AD-1631099, AD-1631100, AD-1631101, AD-1631102, AD-1631103, AD-1631104, AD-1631105, AD-1631106, AD-1631107, AD-1631108, AD-1631109, AD-1631110, AD-1631111, AD-1631112, AD-1631113, AD-1631114, AD-1631115, AD-1631116, AD-1631117, AD-1631118, AD-1631119, AD-1631120, AD-1631121, AD-1631122, AD-1631123, AD-1631124, AD-1631125, AD-1631126, AD-1631127, AD-1631128, AD-1631129, AD-1631130, AD-1631131, AD-1631132, AD-1631133, AD-1631134, AD-1631135, AD-1631136, AD-1631137, AD-1631138, AD-1631139, AD-1631140, AD-1631141, AD-1631142, AD-1631143, AD-1631144, AD-1631145, AD-1631146, AD-1631147, AD-1631148, AD-1631149, AD-1631150, AD-1631151, AD-1631152, AD-1631153, AD-1631154, AD-1631155, AD-1631156, AD-1631157, AD-1631158, AD-1631159, AD-1631160, AD-1631161, AD-1631162, AD-1631163, AD-1631164, AD-1631165, AD-1631166, AD-1631167, AD-1631168, AD-1631169, AD-1631170, AD-1631171, AD-1631172, AD-1631173, AD-1631174, AD-1631175, AD-1631176, AD-1631177, AD-1631178, AD-1631179, AD-1631180, AD-1631181, AD-1631182, AD-1631183, AD-1631184, AD-1631185, AD-1631186, AD-1631187, AD-1631188, AD-1631189, AD-1631190, AD-1631191, AD-1631192, AD-1631193, AD-1631194, AD-1631195, AD-1631196, AD-1631197, AD-1631198, AD-1631199, AD-1631200, AD-1631201, AD-1631202, AD-1631203, AD-1631204, AD-1631205, AD-1631206, AD-1631207, AD-1631208, AD-1631209, AD-1631210, AD-1631211, AD-1631212, AD-1631213, AD-1631214, AD-1631215, AD-1631216, AD-1631217, AD-1631218, AD-1631219, AD-1631220, AD-1631221, AD-1807334, AD-1807335, AD-1807336, AD-1807337, AD-1807338, AD-1807339, AD-1807340, AD-1807341, AD-1807342, AD-1807343, AD-1807344, AD-1807345, AD-1807346, AD-1807347, AD-1807348, AD-1807349, AD-1807350, AD-1807351, AD-1807352, AD-1807353, AD-1807354, AD-1807355, AD-1807356, AD-1807357, AD-1807358, AD-1807359, AD-1807360, AD-1807361, AD-1807362, AD-1807363, AD-1807364, AD-1807365, AD-1807366, AD-1807367, AD-1807368, AD-1807369, AD-1807370, AD-1807371, AD-1807372, AD-1807373, AD-1807374, AD-1807375, AD-1807376, AD-1807377, AD-1807378, AD-1807379, AD-1807380, AD-1807381, AD-1807382, AD-1807383, AD-1807384, AD-1807385, AD-1807386, AD-1807387, AD-1807388, AD-1807389, AD-1807390, AD-1807391, AD-1807392, AD-1807393, AD-1807394, AD-1807395, AD-1807396, AD-1807397, AD-1807398, AD-1807399, AD-1807400, AD-1807401, AD-1807402, AD-1807403, AD-1807404, AD-1807405, AD-1807406, AD-1807407, AD-1807408, AD-1807409, AD-1807410, AD-1807411, AD-1807412, AD-1807413, AD-1807414, AD-1807415, AD-1807416, AD-1807417, AD-1807418, AD-1807419, AD-1807420, AD-1807421, AD-1807422, and AD-1807423.

[0180] In one embodiment, the antisense strand comprises at least 15 contiguous nucleotides differing by no more than three nucleotides from any one of the antisense strand nucleotide sequences of a duplex selected from the group consisting of AD-1624152, AD-1624178, AD-1624412, AD-1624595, AD-1624721, AD-1624739, AD-1624856, AD-1624857, AD-1624894, AD-1625057, AD-1625155, AD-1625191, AD-1625192, AD-1625195, AD-1625209, AD-1625230, AD-1625282, AD-1625389, AD-1625485, AD-1625499, AD-1625501, AD-1625610, AD-1625786, AD-1625910, AD-1625928, AD-1625975, AD-1626183, AD-1626184, AD-1626265, AD-1626266, AD-1626268, AD-1626270, AD-1626273, AD-1626280, AD-1626349, AD-1626353, AD-1626375, AD-1626382, AD-1626428, AD-1626524, AD-1626636, AD-1626921, AD-1626925, AD-1626927, AD-1626936, AD-1626946, AD-1627077, AD-1627110, AD-1627308, AD-1627390, AD-1627410, AD-1627411, AD-1627412, AD-1627511, AD, 1627601, AD-1627625, AD-1627631, AD-1627632, AD-1627672, AD-1627717, AD-1627766, AD-1627767, AD-1627769, AD-1627772, AD-1627820, AD-1627838, AD-1627852, AD-1627856, AD-1627866, AD-1627870, AD-1627896, AD-1627952, AD-1628008, AD-1628014, AD-1628027, AD-1628042, AD-1628043, AD-1628044, AD-1628050, AD-1628052, AD-1628070, AD-1628073, AD-1628118, AD-1628119, AD-1628133, AD-1628253, AD-1628254, AD-1628273, AD-1628318, AD-1628381, AD-1628382, AD-1628383, AD-1628385, AD-1628396, AD-1628412, AD-1628434, AD-1628441, AD-1628442, AD-1628443, AD-1628444, AD-1628467, AD-1628570, AD-1628590, AD-1628668, AD-1628754, AD-1628759, AD-1628764, AD-1628794, AD-1628883, AD-1628951, AD-1628961, AD-1628963, AD-1629007, AD-1629012, AD-1629024, AD-1629025, AD-1629026, AD-1629028, AD-1629031, AD-1629032, AD-1629033, AD-1629039, AD-1629092, AD-1629200, AD-1629214, AD-1629216, AD-1629223, AD-1629224, AD-1629263, AD-1629280, AD-1629292, AD-1629298, AD-1629304, AD-1629419, AD-1629524, AD-1629573, AD-1629580, AD-1629581, AD-1629597, AD-1629619, AD-1629620, AD-1629621, AD-1629665, AD-1629707, AD-1629710, AD-1629711, AD-1629763, AD-1629799, AD-1629807, AD-1629808, AD-1629809, AD-1629838, AD-1629876, AD-1629878, AD-1630135, AD-1630136, AD-1631019, AD-1631020, AD-1631021, AD-1631022, AD-1631023, AD-1631024, AD-1631025, AD-1631026, AD-1631027, AD-1631028, AD-1631029, AD-1631030, AD-1631031, AD-1631032, AD-1631033, AD-1631034, AD-1631035, AD-1631036, AD-1631037, AD-1631038, AD-1631039, AD-1631040, AD-1631041, AD-1631042, AD-1631043, AD-1631044, AD-1631045, AD-1631046, AD-1631047, AD-1631048, AD-1631049, AD-1631050, AD-1631051, AD-1631052, AD-1631053, AD-1631054, AD-1631055, AD-1631056, AD-1631057, AD-1631058, AD-1631059, AD-1631060, AD-1631061, AD-1631062, AD-1631063, AD-1631064, AD-1631065, AD-1631066, AD-1631067, AD-1631068, AD-1631069, AD-1631070, AD-1631071, AD-1631072, AD-1631073, AD-1631074, AD-1631075, AD-1631076, AD-1631077, AD-1631078, AD-1631079, AD-1631080, AD-1631081, AD-1631082, AD-1631083, AD-1631084, AD-1631085, AD-1631086, AD-1631087, AD-1631088, AD-1631089, AD-1631090, AD-1631091, AD-1631092, AD-1631093, AD-1631094, AD-1631095, AD-1631096, AD-1631097, AD-1631098, AD-1631099, AD-1631100, AD-1631101, AD-1631102, AD-1631103, AD-1631104, AD-1631105, AD-1631106, AD-1631107, AD-1631108, AD-1631109, AD-1631110, AD-1631111, AD-1631112, AD-1631113, AD-1631114, AD-1631115, AD-1631116, AD-1631117, AD-1631118, AD-1631119, AD-1631120, AD-1631121, AD-1631122, AD-1631123, AD-1631124, AD-1631125, AD-1631126, AD-1631127, AD-1631128, AD-1631129, AD-1631130, AD-1631131, AD-1631132, AD-1631133, AD-1631134, AD-1631135, AD-1631136, AD-1631137, AD-1631138, AD-1631139, AD-1631140, AD-1631141, AD-1631142, AD-1631143, AD-1631144, AD-1631145, AD-1631146, AD-1631147, AD-1631148, AD-1631149, AD-1631150, AD-1631151, AD-1631152, AD-1631153, AD-1631154, AD-1631155, AD-1631156, AD-1631157, AD-1631158, AD-1631159, AD-1631160, AD-1631161, AD-1631162, AD-1631163, AD-1631164, AD-1631165, AD-1631166, AD-1631167, AD-1631168, AD-1631169, AD-1631170, AD-1631171, AD-1631172, AD-1631173, AD-1631174, AD-1631175, AD-1631176, AD-1631177, AD-1631178, AD-1631179, AD-1631180, AD-1631181, AD-1631182, AD-1631183, AD-1631184, AD-1631185, AD-1631186, AD-1631187, AD-1631188, AD-1631189, AD-1631190, AD-1631191, AD-1631192, AD-1631193, AD-1631194, AD-1631195, AD-1631196, AD-1631197, AD-1631198, AD-1631199, AD-1631200, AD-1631201, AD-1631202, AD-1631203, AD-1631204, AD-1631205, AD-1631206, AD-1631207, AD-1631208, AD-1631209, AD-1631210, AD-1631211, AD-1631212, AD-1631213, AD-1631214, AD-1631215, AD-1631216, AD-1631217, AD-1631218, AD-1631219, AD-1631220 and AD-1631221, AD-1807334, AD-1807335, AD-1807336, AD-1807337, AD-1807338, AD-1807339, AD-1807340, AD-1807341, AD-1807342, AD-1807343, AD-1807344, AD-1807345, AD-1807346, AD-1807347, AD-1807348, AD-1807349, AD-1807350, AD-1807351, AD-1807352, AD-1807353, AD-1807354, AD-1807355, AD-1807356, AD-1807357, AD-1807358, AD-1807359, AD-1807360, AD-1807361, AD-1807362, AD-1807363, AD-1807364, AD-1807365, AD-1807366, AD-1807367, AD-1807368, AD-1807369, AD-1807370, AD-1807371, AD-1807372, AD-1807373, AD-1807374, AD-1807375, AD-1807376, AD-1807377, AD-1807378, AD-1807379, AD-1807380, AD-1807381, AD-1807382, AD-1807383, AD-1807384, AD-1807385, AD-1807386, AD-1807387, AD-1807388, AD-1807389, AD-1807390, AD-1807391, AD-1807392, AD-1807393, AD-1807394, AD-1807395, AD-1807396, AD-1807397, AD-1807398, AD-1807399, AD-1807400, AD-1807401, AD-1807402, AD-1807403, AD-1807404, AD-1807405, AD-1807406, AD-1807407, AD-1807408, AD-1807409, AD-1807410, AD-1807411, AD-1807412, AD-1807413, AD-1807414, AD-1807415, AD-1807416, AD-1807417, AD-1807418, AD-1807419, AD-1807420, AD-1807421, AD-1807422, and AD-1807423.

[0181] In one embodiment, at least partial suppression of the expression of a LRRK2 gene, is assessed by a reduction of the amount of LRRK2 mRNA, e.g., sense mRNA, antisense mRNA, total LRRK2 mRNA, which can be isolated from or detected in a first cell or group of cells in which a LRRK2 gene is transcribed and which has or have been treated such that the expression of a LRRK2 gene is inhibited, as compared to a second cell or group of cells substantially identical to the first cell or group of cells but which has or have not been so treated (control cells). The degree of inhibition (e.g., percent remaining mRNA expression) may be expressed in terms of:

$$\frac{( mRNA in control cells ) - ( mRNA in treated cells )}{( mRNA in control cells )} \times 100 \%$$

[0182] The phrase “contacting a cell with an RNAi agent,” such as a dsRNA, as used herein, includes contacting a cell by any possible means. Contacting a cell with an RNAi agent includes contacting a cell in vitro with the RNAi agent or contacting a cell in vivo with the RNAi agent. The contacting may be done directly or indirectly. Thus, for example, the RNAi agent may be put into physical contact with the cell by the individual performing the method, or alternatively, the RNAi agent may be put into a situation that permits or causes it to subsequently come into contact with the cell.

[0183] Contacting a cell in vitro may be done, for example, by incubating the cell with the RNAi agent. Contacting a cell in vivo may be done, for example, by injecting the RNAi agent into or near the tissue where the cell is located, or by injecting the RNAi agent into another area, e.g., the central nervous system (CNS), optionally via intrathecal, intravitreal, intracisternal or other injection, or to the bloodstream (i.e., intravenous) or the subcutaneous space, such that the agent subsequently reaches the tissue where the cell to be contacted is located. For example, the RNAi agent may contain or be coupled to a ligand, e.g., a lipophilic moiety or moieties as described below and further detailed, e.g., in PCT/US2019/031170, which is incorporated herein by reference, that directs or otherwise stabilizes the RNAi agent at a site of interest, e.g., the CNS. Combinations of in vitro and in vivo methods of contacting are also possible. For example, a cell may also be contacted in vitro with an RNAi agent and subsequently transplanted into a subject.

[0184] In one embodiment, contacting a cell with an RNAi agent includes “introducing” or “delivering the RNAi agent into the cell” by facilitating or effecting uptake or absorption into the cell. Absorption or uptake of an RNAi agent can occur through unaided diffusive or active cellular processes, or by auxiliary agents or devices. Introducing an RNAi agent into a cell may be in vitro or in vivo. For example, for in vivo introduction, an RNAi agent can be injected into a tissue site or administered systemically. In vitro introduction into a cell includes methods known in the art such as electroporation and lipofection. Further approaches are described herein below or are known in the art.

[0185] The term “lipophile” or “lipophilic moiety” broadly refers to any compound or chemical moiety having an affinity for lipids. One way to characterize the lipophilicity of the lipophilic moiety is by the octanol-water partition coefficient, log K_{0W}, where K_{0W} is the ratio of a chemical's concentration in the octanol-phase to its concentration in the aqueous phase of a two-phase system at equilibrium. The octanol-water partition coefficient is a laboratory-measured property of a substance. However, it may also be predicted by using coefficients attributed to the structural components of a chemical which are calculated using first-principle or empirical methods (see, for example, Tetko et al., J. Chem. Inf Comput. Sci. 41:1407-21 (2001), which is incorporated herein by reference in its entirety). It provides a thermodynamic measure of the tendency of the substance to prefer a non-aqueous or oily milieu rather than water (i.e. its hydrophilic/lipophilic balance). In principle, a chemical substance is lipophilic in character when its log K_{0W} exceeds 0. Typically, the lipophilic moiety possesses a log K_{0W} exceeding 1, exceeding 1.5, exceeding 2, exceeding 3, exceeding 4, exceeding 5, or exceeding 10. For instance, the log K_{0W} of 6-amino hexanol, for instance, is predicted to be approximately 0.7. Using the same method, the log K_{0W} of cholesteryl N-(hexan-6-ol) carbamate is predicted to be 10.7.

[0186] The lipophilicity of a molecule can change with respect to the functional group it carries. For instance, adding a hydroxyl group or amine group to the end of a lipophilic moiety can increase or decrease the partition coefficient (e.g., log K_{0W}) value of the lipophilic moiety.

[0187] Alternatively, the hydrophobicity of the double-stranded RNAi agent, conjugated to one or more lipophilic moieties, can be measured by its protein binding characteristics. For instance, in certain embodiments, the unbound fraction in the plasma protein binding assay of the double-stranded RNAi agent could be determined to positively correlate to the relative hydrophobicity of the double-stranded RNAi agent, which could then positively correlate to the silencing activity of the double-stranded RNAi agent.

[0188] In one embodiment, the plasma protein binding assay determined is an electrophoretic mobility shift assay (EMSA) using human serum albumin protein. An exemplary protocol of this binding assay is illustrated in detail in, e.g., PCT/US2019/031170. Briefly, duplexes were incubated with human serum albumin and the unbound fraction was determined. Exemplary assay protocol includes duplexes at a stock concentration of 10 μM, diluted to a final concentration of 0.5 μM (20 μL total volume) containing 0, 20, or 90% serum in 1× PBS. The samples can be mixed, centrifuged for 30 seconds, and subsequently incubated at room temperature for 10 minutes. Once incubation step is completed, 4 μL of 6× EMSA Gel-loading solution can be added to each sample, centrifuged for 30 seconds, and 12 μL of each sample can be loaded onto a 26 well BioRad 10% PAGE (polyacrylamide gel electrophoresis). The gel can be run for 1 hour at 100 volts. After completion of the run, the gel is removed from the casing and washed in 50 mL of 10% TBE (Tris base, boric acid and EDTA). Once washing is complete, 5 μL of SYBR Gold can be added to the gel, which is then allowed to incubate at room temperature for 10 minutes, and the gel-washed again in 50 mL of 10% TBE. In this exemplary assay, a Gel Doc XR+ gel documentation system may be used to read the gel using the following parameters: the imaging application set to SYBR Gold, the size set to Bio-Rad criterion gel, the exposure set to automatic for intense bands, the highlight saturated pixels may be turned one and the color is set to gray. The detection, molecular weight analysis, and output can all disabled. Once a clean photo of the gel is obtained Image Lab 5.2 may be used to process the image. The lanes and bands can be manually set to measure band intensity. Band intensities of each sample can be normalized to PBS to obtain the fraction of unbound siRNA. From this measurement relative hydrophobicity can determined. The hydrophobicity of the double-stranded RNAi agent, measured by fraction of unbound siRNA in the binding assay, exceeds 0.15, exceeds 0.2, exceeds 0.25, exceeds 0.3, exceeds 0.35, exceeds 0.4, exceeds 0.45, or exceeds 0.5 for an enhanced in vivo delivery of siRNA.

[0189] Accordingly, conjugating the lipophilic moieties to the internal position(s) of the double-stranded RNAi agent provides improved hydrophobicity for the enhanced in vivo delivery of siRNA.

[0190] The term “lipid nanoparticle” or “LNP” is a vesicle comprising a lipid layer encapsulating a pharmaceutically active molecule, such as a nucleic acid molecule, e.g., a rNAi agent or a plasmid from which an RNAi agent is transcribed. LNPs are described in, for example, U.S. Pat. Nos. 6,858,225, 6,815,432, 8,158,601, and 8,058,069, the entire contents of which are hereby incorporated herein by reference.

[0191] As used herein, a “subject” is an animal, such as a mammal, including a primate (such as a human, a non-human primate, e.g., a monkey, and a chimpanzee), or a non-primate (such as a rat, or a mouse). In a preferred embodiment, the subject is a human, such as a human being treated or assessed for a disease, disorder, or condition that would benefit from reduction in LRRK2 expression; a human at risk for a disease, disorder, or condition that would benefit from reduction in LRRK2 expression; a human having a disease, disorder, or condition that would benefit from reduction in LRRK2 expression; or human being treated for a disease, disorder, or condition that would benefit from reduction in LRRK2 expression as described herein.

[0192] In some embodiments, the subject is a female human. In other embodiments, the subject is a male human. In one embodiment, the subject is an adult subject. In one embodiment, the subject is a pediatric subject. In another embodiment, the subject is a juvenile subject, i.e., a subject below 20 years of age.

[0193] As used herein, the terms “treating” or “treatment” refer to a beneficial or desired result including, but not limited to, alleviation or amelioration of one or more signs or symptoms associated with LRRK2 gene expression or LRRK2 protein production, e.g., LRRK2-associated diseases, such as LRRK2-associated disease. “Treatment” can also mean prolonging survival as compared to expected survival in the absence of treatment.

[0194] The term “lower” in the context of the level of LRRK2 in a subject or a disease marker or symptom refers to a statistically significant decrease in such level. The decrease can be, for example, at least 10%, 15%, 20% 25% 30%, %, 40%, 45%, 50%, 55%, 60%, 65%, 70%, 75% 80%, 85%, 90%, 95%, or more. In certain embodiments, a decrease is at least 20%. In certain embodiments, the decrease is at least 50% in a disease marker, e.g., the level of sense- or antisense-containing foci and/or the level of aberrant dipeptide repeat protein, e.g., a decrease of 50%, 55%, 60%, 65%, 70%, 75%, 80%, 85%, 90%, 95%, or more. In some embodiments, a decrease is at least about 25% in a disease marker, e.g., LRRK2 protein and/or gene expression level is decreased by, e.g., at least about 25%, at least about 30%, at least about 40%, at least about 50%, at least about 60%, at least about 70%, at least about 80%, at least about 90%, or at least about 95%. “Lower” in the context of the level of LRRK2 in a subject is preferably down to a level accepted as within the range of normal for an individual without such disorder. In certain embodiments, “lower” is the decrease in the difference between the level of a marker or symptom for a subject suffering from a disease and a level accepted within the range of normal for an individual, e.g., the level of decrease in bodyweight between an obese individual and an individual having a weight accepted within the range of normal.

[0195] As used herein, “prevention” or “preventing,” when used in reference to a disease, disorder, or condition thereof, that would benefit from a reduction in expression of a LRRK2 gene or production of a LRRK2 protein, refers to a reduction in the likelihood that a subject will develop a symptom associated with such a disease, disorder, or condition, e.g., a symptom of a LRRK2-associated disease. The failure to develop a disease, disorder, or condition, or the reduction in the development of a symptom associated with such a disease, disorder, or condition (e.g., by at least about 10% on a clinically accepted scale for that disease or disorder), or the exhibition of delayed symptoms delayed (e.g., by days, weeks, months or years) is considered effective prevention.

[0196] As used herein, the term “LRRK2-associated disease” or “LRRK2-associated disorder” includes any disease or disorder that would benefit from reduction in the expression and/or activity of LRRK2. Exemplary LRRK2-associated diseases include those diseases in which subjects carry missense mutations and/or deletions in the LRRK2 gene, e.g., Neurodegenerative disease such as Parkinson's disease (PD), Crohn's disease and ocular disorders. Neurodegenerative diseases include, but are not limited to, Parkinson's Disease, Amyotrophic Lateral Sclerosis (ALS), Alzheimer's Disease, Huntington's disease, Schizophrenia, progressive myoclonic epilepsy (Unver-Richt-Lundberg Lafora disease), Hallervorden-Spatz Disease, Retinitis Pigmentosa, Xeroderma Pigmentosum, and Melanin-related diseases. An “ocular disorder,” or “ocular system disorder”, as used herein refers to any disorder system of the eye and its visual system (e.g., cornea, lens, and fluids). Non-limiting examples of ocular disorders include edema in the eyes, lens, and otic vesicles.

[0197] A LRRK2 missense mutation, e.g., G2019S, A2016T, may be found in subjects with either familial or sporadic Parkinson's disease. The mutations may lead to a two- or three-fold increase in kinase activity, which may result in activation of the neuronal death signaling pathway.

[0198] Subjects having missense mutations in the LRRK2 gene can present as an autosomal dominant disease and is the most common form of familial PD, accounting for 1-2% of all PD cases. The common pathogenic mutations in LRRK2 associated with PD reside in the GTPase and kinase domains with the most prevalent mutation, the G2019S mutation, in the kinase domain.

[0199] “Therapeutically effective amount,” as used herein, is intended to include the amount of an RNAi agent that, when administered to a subject having a LRRK2-associated disease, is sufficient to effect treatment of the disease (e.g., by diminishing, ameliorating, or maintaining the existing disease or one or more symptoms of disease). The “therapeutically effective amount” may vary depending on the RNAi agent, how the agent is administered, the disease and its severity and the history, age, weight, family history, genetic makeup, the types of preceding or concomitant treatments, if any, and other individual characteristics of the subject to be treated.

[0200] “Prophylactically effective amount,” as used herein, is intended to include the amount of an RNAi agent that, when administered to a subject having a LRRK2-associated disorder, is sufficient to prevent or ameliorate the disease or one or more symptoms of the disease. Ameliorating the disease includes slowing the course of the disease or reducing the severity of later-developing disease. The “prophylactically effective amount” may vary depending on the RNAi agent, how the agent is administered, the degree of risk of disease, and the history, age, weight, family history, genetic makeup, the types of preceding or concomitant treatments, if any, and other individual characteristics of the patient to be treated.

[0201] A “therapeutically-effective amount” or “prophylactically effective amount” also includes an amount of an RNAi agent that produces some desired local or systemic effect at a reasonable benefit/risk ratio applicable to any treatment. An RNAi agent employed in the methods of the present disclosure may be administered in a sufficient amount to produce a reasonable benefit/risk ratio applicable to such treatment.

[0202] The phrase “pharmaceutically acceptable” is employed herein to refer to those compounds, materials, compositions, or dosage forms which are, within the scope of sound medical judgment, suitable for use in contact with the tissues of human subjects and animal subjects without excessive toxicity, irritation, allergic response, or other problem or complication, commensurate with a reasonable benefit/risk ratio.

[0203] The phrase “pharmaceutically-acceptable carrier” as used herein means a pharmaceutically-acceptable material, composition or vehicle, such as a liquid or solid filler, diluent, excipient, manufacturing aid (e.g., lubricant, talc magnesium, calcium or zinc stearate, or steric acid), or solvent encapsulating material, involved in carrying or transporting the subject compound from one organ, or portion of the body, to another organ, or portion of the body. Each carrier must be “acceptable” in the sense of being compatible with the other ingredients of the formulation and not injurious to the subject being treated. Some examples of materials which can serve as pharmaceutically-acceptable carriers include: (1) sugars, such as lactose, glucose and sucrose; (2) starches, such as corn starch and potato starch; (3) cellulose, and its derivatives, such as sodium carboxymethyl cellulose, ethyl cellulose and cellulose acetate; (4) powdered tragacanth; (5) malt; (6) gelatin; (7) lubricating agents, such as magnesium state, sodium lauryl sulfate and talc; (8) excipients, such as cocoa butter and suppository waxes; (9) oils, such as peanut oil, cottonseed oil, safflower oil, sesame oil, olive oil, com oil and soybean oil; (10) glycols, such as propylene glycol; (11) polyols, such as glycerin, sorbitol, mannitol and polyethylene glycol; (12) esters, such as ethyl oleate and ethyl laurate; (13) agar; (14) buffering agents, such as magnesium hydroxide and aluminum hydroxide; (15) alginic acid; (16) pyrogen-free water; (17) isotonic saline; (18) Ringer's solution; (19) ethyl alcohol; (20) pH buffered solutions; (21) polyesters, polycarbonates or polyanhydrides; (22) bulking agents, such as polypeptides and amino acids (23) serum component, such as serum albumin, HDL and LDL; and (22) other non-toxic compatible substances employed in pharmaceutical formulations.

[0204] The term “sample,” as used herein, includes a collection of similar fluids, cells, or tissues isolated from a subject, as well as fluids, cells, or tissues present within a subject. Examples of biological fluids include blood, serum and serosal fluids, plasma, cerebrospinal fluid, ocular fluids, lymph, urine, saliva, and the like. Tissue samples may include samples from tissues, organs or localized regions. For example, samples may be derived from particular organs, parts of organs, or fluids or cells within those organs. In certain embodiments, samples may be derived from the brain (e.g., whole brain or certain segments of brain, e.g., striatum, or certain types of cells in the brain, such as, e.g., neurons and glial cells (astrocytes, oligodendrocytes, microglial cells)). In some embodiments, a “sample derived from a subject” refers to blood drawn from the subject or plasma or serum derived therefrom. In further embodiments, a “sample derived from a subject” refers to brain tissue (or subcomponents thereof) or retinal tissue (or subcomponents thereof) derived from the subject.

[0205] The term “substituted” refers to the replacement of one or more hydrogen radicals in a given structure with the radical of a specified substituent including, but not limited to: alkyl, alkenyl, alkynyl, aryl, heterocyclyl, halo, thiol, alkylthio, arylthio, alkylthioalkyl, arylthioalkyl, alkylsulfonyl, alkylsulfonylalkyl, arylsulfonylalkyl, alkoxy, aryloxy, aralkoxy, aminocarbonyl, alkylaminocarbonyl, arylaminocarbonyl, alkoxycarbonyl, aryloxycarbonyl, haloalkyl, amino, trifluoromethyl, cyano, nitro, alkylamino, arylamino, alkylaminoalkyl, arylaminoalkyl, aminoalkylamino, hydroxy, alkoxyalkyl, carboxyalkyl, alkoxycarbonylalkyl, aminocarbonylalkyl, acyl, aralkoxycarbonyl, carboxylic acid, sulfonic acid, sulfonyl, phosphonic acid, aryl, heteroaryl, heterocyclic, and aliphatic. It is understood that the substituent can be further substituted.

[0206] The term “alkyl” refers to saturated and unsaturated non-aromatic hydrocarbon chains that may be a straight chain or branched chain, containing the indicated number of carbon atoms (these include without limitation propyl, allyl, or propargyl), which may be optionally inserted with N, O, or S. For example, “(C1-C6)alkyl” means a radical having from 1-6 carbon atoms in a linear or branched arrangement. “(C1-C6)alkyl” includes, for example, methyl, ethyl, propyl, iso-propyl, n-butyl, tert-butyl, pentyl and hexyl. In certain embodiments, a lipophilic moiety of the instant disclosure can include a C6-C18 alkyl hydrocarbon chain.

[0207] The term “alkylene” refers to an optionally substituted saturated aliphatic branched or straight chain divalent hydrocarbon radical having the specified number of carbon atoms. For example, “(C1-C6)alkylene” means a divalent saturated aliphatic radical having from 1-6 carbon atoms in a linear arrangement, e.g., [(CH₂)ₙ], where n is an integer from 1 to 6. “(C1-C6)alkylene” includes methylene, ethylene, propylene, butylene, pentylene and hexylene. Alternatively, “(C1-C6)alkylene” means a divalent saturated radical having from 1-6 carbon atoms in a branched arrangement, for example: [(CH₂CH₂CH₂CH₂CH(CH₃)], [(CH₂CH₂CH₂CH₂C(CH₃)₂], [(CH₂C(CH₃)₂CH(CH₃))], and the like. The term “alkylenedioxo” refers to a divalent species of the structure —O—R—O—, in which R represents an alkylene.

[0208] The term “mercapto” refers to an —SH radical. The term “thioalkoxy” refers to an —S— alkyl radical.

[0209] The term “halo” refers to any radical of fluorine, chlorine, bromine or iodine. “Halogen” and “halo” are used interchangeably herein.

[0210] As used herein, the term “cycloalkyl” means a saturated or unsaturated nonaromatic hydrocarbon ring group having from 3 to 14 carbon atoms, unless otherwise specified. For example, “(C3-C10) cycloalkyl” means a hydrocarbon radical of a (3-10)-membered saturated aliphatic cyclic hydrocarbon ring. Examples of cycloalkyl groups include, but are not limited to, cyclopropyl, methyl-cyclopropyl, 2,2-dimethyl-cyclobutyl, 2-ethyl-cyclopentyl, cyclohexyl, etc. Cycloalkyls may include multiple spiro- or fused rings. Cycloalkyl groups are optionally mono-, di-, tri-, tetra-, or penta-substituted on any position as permitted by normal valency.

[0211] As used herein, the term “alkenyl” refers to a non-aromatic hydrocarbon radical, straight or branched, containing at least one carbon-carbon double bond, and having from 2 to 10 carbon atoms unless otherwise specified. Up to five carbon-carbon double bonds may be present in such groups. For example, “C2-C6” alkenyl is defined as an alkenyl radical having from 2 to 6 carbon atoms. Examples of alkenyl groups include, but are not limited to, ethenyl, propenyl, butenyl, and cyclohexenyl. The straight, branched, or cyclic portion of the alkenyl group may contain double bonds and is optionally mono-, di-, tri-, tetra-, or penta-substituted on any position as permitted by normal valency. The term “cycloalkenyl” means a monocyclic hydrocarbon group having the specified number of carbon atoms and at least one carbon-carbon double bond.

[0212] As used herein, the term “alkynyl” refers to a hydrocarbon radical, straight or branched, containing from 2 to 10 carbon atoms, unless otherwise specified, and containing at least one carbon-carbon triple bond. Up to 5 carbon-carbon triple bonds may be present. Thus, “C2-C6 alkynyl” means an alkynyl radical having from 2 to 6 carbon atoms. Examples of alkynyl groups include, but are not limited to, ethynyl, 2-propynyl, and 2-butynyl. The straight or branched portion of the alkynyl group may contain triple bonds as permitted by normal valency, and may be optionally mono-, di-, tri-, tetra-, or penta-substituted on any position as permitted by normal valency.

[0213] As used herein, “alkoxyl” or “alkoxy” refers to an alkyl group as defined above with the indicated number of carbon atoms attached through an oxygen bridge. For example, “(C1-C3)alkoxy” includes methoxy, ethoxy and propoxy. For example, “(C1-C6)alkoxy”, is intended to include C1, C2, C3, C4, C5, and C6 alkoxy groups. For example, “(C1-C8)alkoxy”, is intended to include C1, C2, C3, C4, C5, C6, C7, and C8 alkoxy groups. Examples of alkoxy include, but are not limited to, methoxy, ethoxy, n-propoxy, i-propoxy, n-butoxy, s-butoxy, t-butoxy, n-pentoxy, s-pentoxy, n-heptoxy, and n-octoxy. “Alkylthio” means an alkyl radical attached through a sulfur linking atom. The terms “alkylamino” or “aminoalkyl”, means an alkyl radical attached through an NH linkage. “Dialkylamino” means two alkyl radical attached through a nitrogen linking atom. The amino groups may be unsubstituted, monosubstituted, or di-substituted. In some embodiments, the two alkyl radicals are the same (e.g., N,N-dimethylamino). In some embodiments, the two alkyl radicals are different (e.g., N-ethyl-N-methylamino).

[0214] As used herein, “aryl” or “aromatic” means any stable monocyclic or polycyclic carbon ring of up to 7 atoms in each ring, wherein at least one ring is aromatic. Examples of aryl groups include, but are not limited to, phenyl, naphthyl, anthracenyl, tetrahydronaphthyl, indanyl, and biphenyl. In cases where the aryl substituent is bicyclic and one ring is non-aromatic, it is understood that attachment is via the aromatic ring. Aryl groups are optionally mono-, di-, tri-, tetra-, or penta-substituted on any position as permitted by normal valency. The term “arylalkyl” or the term “aralkyl” refers to alkyl substituted with an aryl. The term “arylalkoxy” refers to an alkoxy substituted with aryl.

[0215] “Hetero” refers to the replacement of at least one carbon atom in a ring system with at least one heteroatom selected from N, S and O. “Hetero” also refers to the replacement of at least one carbon atom in an acyclic system. A hetero ring system or a hetero acyclic system may have, for example, 1, 2 or 3 carbon atoms replaced by a heteroatom.

[0216] As used herein, the term “heteroaryl” represents a stable monocyclic or polycyclic ring of up to 7 atoms in each ring, wherein at least one ring is aromatic and contains from 1 to 4 heteroatoms selected from the group consisting of O, N and S. Examples of heteroaryl groups include, but are not limited to, acridinyl, carbazolyl, cinnolinyl, quinoxalinyl, pyrrazolyl, indolyl, benzotriazolyl, furanyl, thienyl, benzothienyl, benzofuranyl, benzimidazolonyl, benzoxazolonyl, quinolinyl, isoquinolinyl, dihydroisoindolonyl, imidazopyridinyl, isoindolonyl, indazolyl, oxazolyl, oxadiazolyl, isoxazolyl, indolyl, pyrazinyl, pyridazinyl, pyridinyl, pyrimidinyl, pyrrolyl, tetrahydroquinoline. “Heteroaryl” is also understood to include the N-oxide derivative of any nitrogen-containing heteroaryl. In cases where the heteroaryl substituent is bicyclic and one ring is non-aromatic or contains no heteroatoms, it is understood that attachment is via the aromatic ring or via the heteroatom containing ring. Heteroaryl groups are optionally mono-, di-, tri-, tetra-, or penta-substituted on any position as permitted by normal valency.

[0217] As used herein, the term “heterocycle,” “heterocyclic,” or “heterocyclyl” means a 3- to 14-membered aromatic or nonaromatic heterocycle containing from 1 to 4 heteroatoms selected from the group consisting of O, N and S, including polycyclic groups. As used herein, the term “heterocyclic” is also considered to be synonymous with the terms “heterocycle” and “heterocyclyl” and is understood as also having the same definitions set forth herein. “Heterocyclyl” includes the above mentioned heteroaryls, as well as dihydro and tetrahydro analogs thereof. Examples of heterocyclyl groups include, but are not limited to, azetidinyl, benzoimidazolyl, benzofuranyl, benzofurazanyl, benzopyrazolvl, benzotriazolyl, benzothiophenyl, benzoxazolyl, carbazolyl, carbolinyl, cinnolinyl, furanyl, imidazolyl, indolinyl, indolyl, indolazinyl, indazolyl, isobenzofuranyl, isoindolyl, isoquinolyl, isothiazolyl, isoxazolyl, naphthpyridinyl, oxadiazolyl, oxooxazolidinyl, oxazolyl, oxazoline, oxopiperazinyl, oxopyrrolidinyl, oxomorpholinyl, isoxazoline, oxetanyl, pyranyl, pyrazinyl, pyrazolyl, pyridazinyl, pyridopyridinyl, pyridazinyl, pyridyl, pyridinonyl, pyrimidyl, pyrimidinonyl, pyrrolyl, quinazolinyl, quinolyl, quinoxalinyl, tetrahydropyranyl, tetrahydrofuranyl, tetrahydrothiopyranyl, tetrahydroisoquinolinyl, tetrazolyl, tetrazolopyridyl, thiadiazolyl, thiazolyl, thienyl, triazolyl, 1,4-dioxanyl, hexahydroazepinyl, piperazinyl, piperidinyl, pyridin-2-onyl, pyrrolidinyl, morpholinyl, thiomorpholinyl, dihydrobenzoimidazolyl, dihydrobenzofuranyl, dihydrobenzothiophenyl, dihydrobenzoxazolyl, dihydrofuranyl, dihydroimidazolyl, dihydroindolyl, dihydroisooxazolyl, dihydroisothiazolyl, dihydrooxadiazolyl, dihydrooxazolyl, dihydropyrazinyl, dihydropyrazolyl, dihydropyridinyl, dihydropyrimidinyl, dihydropyrrolyl, dihydroquinolinyl, dihydrotetrazolyl, dihydrothiadiazolyl, dihydrothiazolyl, dihydrothienyl, dihydrotriazolyl, dihydroazetidinyl, dioxidothiomorpholinyl, methylenedioxybenzoyl, tetrahydrofuranyl, and tetrahydrothienyl, and N-oxides thereof. Attachment of a heterocyclyl substituent can occur via a carbon atom or via a heteroatom. Heterocyclyl groups are optionally mono-, di-, tri-, tetra-, or penta-substituted on any position as permitted by normal valency.

[0218] “Heterocycloalkyl” refers to a cycloalkyl residue in which one to four of the carbons is replaced by a heteroatom such as oxygen, nitrogen or sulfur. Examples of heterocycles whose radicals are heterocyclyl groups include tetrahydropyran, morpholine, pyrrolidine, piperidine, thiazolidine, oxazole, oxazoline, isoxazole, dioxane, tetrahydrofuran and the like.

[0219] The term “heteroaryl” refers to an aromatic 5-8 membered monocyclic, 8-12 membered bicyclic, or 11-14 membered tricyclic ring system having 1-3 heteroatoms if monocyclic, 1-6 heteroatoms if bicyclic, or 1-9 heteroatoms if tricyclic, said heteroatoms selected from O, N, or S (e.g., carbon atoms and 1-3, 1-6, or 1-9 heteroatoms of N, O, or S if monocyclic, bicyclic, or tricyclic, respectively), wherein 0, 1, 2, 3, or 4 atoms of each ring may be substituted by a substituent. Examples of heteroaryl groups include pyridyl, furyl or furanyl, imidazolyl, benzimidazolyl, pyrimidinyl, thiophenyl or thienyl, quinolinyl, indolyl, thiazolyl, and the like. The term “heteroarylalkyl” or the term “heteroaralkyl” refers to an alkyl substituted with a heteroaryl. The term “heteroarylalkoxy” refers to an alkoxy substituted with heteroaryl.

[0220] The term “cycloalkyl” as employed herein includes saturated and partially unsaturated cyclic hydrocarbon groups having 3 to 12 carbons, for example, 3 to 8 carbons, and, for example, 3 to 6 carbons, wherein the cycloalkyl group additionally may be optionally substituted. Cycloalkyl groups include, without limitation, cyclopropyl, cyclobutyl, cyclopentyl, cyclopentenyl, cyclohexyl, cyclohexenyl, cycloheptyl, and cyclooctyl.

[0221] The term “acyl” refers to an alkylcarbonyl, cycloalkylcarbonyl, arylcarbonyl, heterocyclylcarbonyl, or heteroarylcarbonyl substituent, any of which may be further substituted by substituents.

[0222] As used herein, “keto” refers to any alkyl, alkenyl, alkynyl, cycloalkyl, cycloalkenyl, heterocyclyl, heteroaryl, or aryl group as defined herein attached through a carbonyl bridge.

[0223] Examples of keto groups include, but are not limited to, alkanoyl (e.g., acetyl, propionyl, butanoyl, pentanoyl, hexanoyl), alkenoyl (e.g., acryloyl)alkynoyl (e.g., ethynoyl, propynoyl, butynoyl, pentynoyl, hexynoyl), aryloyl (e.g., benzoyl), heteroaryloyl (e.g., pyrroloyl, imidazoloyl, quinolinoyl, pyridinoyl).

[0224] As used herein, “alkoxycarbonyl” refers to any alkoxy group as defined above attached through a carbonyl bridge (i.e., —C(O)O-alkyl). Examples of alkoxycarbonyl groups include, but are not limited to, methoxycarbonyl, ethoxycarbonyl, iso-propoxycarbonyl, n-propoxycarbonyl, t-butoxycarbonyl, benzyloxycarbonyl or n-pentoxycarbonyl.

[0225] As used herein, “aryloxycarbonyl” refers to any aryl group as defined herein attached through an oxycarbonyl bridge (i.e., —C(O)O-aryl). Examples of aryloxycarbonyl groups include, but are not limited to, phenoxycarbonyl and naphthyloxycarbonyl.

[0226] As used herein, “heteroaryloxycarbonyl” refers to any heteroaryl group as defined herein attached through an oxycarbonyl bridge (i.e., —C(O)O-heteroaryl). Examples of heteroaryloxycarbonyl groups include, but are not limited to, 2-pyridyloxycarbonyl, 2-oxazolyloxycarbonyl, 4-thiazolyloxycarbonyl, or pyrimidinyloxycarbonyl.

[0227] The term “oxo” refers to an oxygen atom, which forms a carbonyl when attached to carbon, an N-oxide when attached to nitrogen, and a sulfoxide or sulfone when attached to sulfur.

[0228] The person of ordinary skill in the art would readily understand and appreciate that the compounds and compositions disclosed herein may have certain atoms (e.g., N, O, or S atoms) in a protonated or deprotonated state, depending upon the environment in which the compound or composition is placed. Accordingly, as used herein, the structures disclosed herein envisage that certain functional groups, such as, for example, OH, SH, or NH, may be protonated or deprotonated. The disclosure herein is intended to cover the disclosed compounds and compositions regardless of their state of protonation based on the pH of the environment, as would be readily understood by the person of ordinary skill in the art.

### II. RNAi Agents of the Disclosure

[0229] Described herein are RNAi agents that inhibit the expression of a LRRK2 gene. In one embodiment, the RNAi agent includes double stranded ribonucleic acid (dsRNA) molecules for inhibiting the expression of a LRRK2 gene in a cell, such as a cell within a subject, e.g., a mammal, such as a human having a LRRK2-associated disease. The dsRNA includes an antisense strand having a region of complementarity which is complementary to at least a part of an mRNA formed in the expression of a LRRK2 gene. The region of complementarity is about 15-30 nucleotides or less in length. Upon contact with a cell expressing the LRRK2 gene, the RNAi agent inhibits the expression of the LRRK2 gene (e.g., a human gene, a primate gene, a non-primate gene) by at least 25%, or higher as described herein, when compared to a similar cell not contacted with the RNAi agent or an RNAi agent not complementary to the LRRK2 gene. Expression of the LRRK2 gene may be assayed by, for example, a PCR or branched DNA (bDNA)-based method, or by a protein-based method, such as by immunofluorescence analysis, using, for example, western blotting or flowcytometric techniques. In one embodiment, the level of knockdown is assayed in human A549 cells using an assay method provided in Example 1 below. In some embodiments, the level of knockdown is assayed in primary mouse hepatocytes. In another embodiment, the level of knockdown is assayed in Cos-7. In yet another embodiment, the level of knockdown is assayed in BE(2)—C cells. In some embodiments, the level of knockdown is assayed in Neuro-2a cells. In some embodiments, the level of knockdown is assayed in A549 cells.

[0230] A dsRNA includes two RNA strands that are complementary and hybridize to form a duplex structure under conditions in which the dsRNA is used. One strand of a dsRNA (the antisense strand) includes a region of complementarity that is substantially complementary, or fully complementary, to a target sequence. The target sequence can be derived from the sequence of an mRNA formed during the expression of a LRRK2 gene. The other strand (the sense strand) includes a region that is complementary to the antisense strand, such that the two strands hybridize and form a duplex structure when combined under suitable conditions. As described elsewhere herein and as known in the art, the complementary sequences of a dsRNA can also be contained as self-complementary regions of a single nucleic acid molecule, as opposed to being on separate oligonucleotides.

[0231] Generally, the duplex structure is 15 to 30 base pairs in length, e.g., 15-29, 15-28, 15-27, 15-26, 15-25, 15-24, 15-23, 15-22, 15-21, 15-20, 15-19, 15-18, 15-17, 18-30, 18-29, 18-28, 18-27, 18-26, 18-25, 18-24, 18-23, 18-22, 18-21, 18-20, 19-30, 19-29, 19-28, 19-27, 19-26, 19-25, 19-24, 19-23, 19-22, 19-21, 19-20, 20-30, 20-29, 20-28, 20-27, 20-26, 20-25, 20-24,20-23, 20-22, 20-21, 21-30, 21-29, 21-28, 21-27, 21-26, 21-25, 21-24, 21-23, or 21-22 base pairs in length. In certain embodiments, the duplex structure is 18 to base pairs in length, e.g., 18-25, 18-24, 18-23, 18-22, 18-21, 18-20, 19-25, 19-24, 19-23, 19-22, 19-21, 19-20, 20-25, 20-24,20-23, 20-22, 20-21, 21-25, 21-24, 21-23, 21-22, 22-25, 22-24, 22-23, 23-25, 23-24 or 24-25 base pairs in length, for example, 19-21 basepairs in length. Ranges and lengths intermediate to the above recited ranges and lengths are also contemplated to be part of the disclosure.

[0232] Similarly, the region of complementarity to the target sequence is 15 to 30 nucleotides in length, e.g., 15-29, 15-28, 15-27, 15-26, 15-25, 15-24, 15-23, 15-22, 15-21, 15-20, 15-19, 15-18, 15-17, 18-30, 18-29, 18-28, 18-27, 18-26, 18-25, 18-24, 18-23, 18-22, 18-21, 18-20, 19-30, 19-29, 19-28, 19-27, 19-26, 19-25, 19-24, 19-23, 19-22, 19-21, 19-20, 20-30, 20-29, 20-28, 20-27, 20-26, 20-25, 20-24,20-23, 20-22, 20-21, 21-30, 21-29, 21-28, 21-27, 21-26, 21-25, 21-24, 21-23, or 21-22 nucleotides in length, for example 19-23 nucleotides in length or 21-23 nucleotides in length. Ranges and lengths intermediate to the above recited ranges and lengths are also contemplated to be part of the disclosure.

[0233] In some embodiments, the duplex structure is 19 to 30 base pairs in length. Similarly, the region of complementarity to the target sequence is 19 to 30 nucleotides in length.

[0234] In some embodiments, the dsRNA is 15 to 23 nucleotides in length, 19 to 23 nucleotides in length, or 25 to 30 nucleotides in length. In general, the dsRNA is long enough to serve as a substrate for the Dicer enzyme. For example, it is well known in the art that dsRNAs longer than about 21-23 nucleotides can serve as substrates for Dicer. As the ordinarily skilled person also recognizes, the region of an RNA targeted for cleavage is most often be part of a larger RNA molecule, often an mRNA molecule. Where relevant, a “part” of an mRNA target is a contiguous sequence of an mRNA target of sufficient length to allow it to be a substrate for RNAi-directed cleavage (i.e., cleavage through a RISC pathway).

[0235] One of skill in the art also recognizes that the duplex region is a primary functional portion of a dsRNA, e.g., a duplex region of about 15 to 36 base pairs, e.g., 15-36, 15-35, 15-34, 15-33, 15-32, 15-31, 15-30, 15-29, 15-28, 15-27, 15-26, 15-25, 15-24, 15-23, 15-22, 15-21, 15-20, 15-19, 15-18, 15-17, 18-30, 18-29, 18-28, 18-27, 18-26, 18-25, 18-24, 18-23, 18-22, 18-21, 18-20, 19-30, 19-29, 19-28, 19-27, 19-26, 19-25, 19-24, 19-23, 19-22, 19-21, 19-20, 20-30, 20-29, 20-28, 20-27, 20-26, 20-25, 20-24,20-23, 20-22, 20-21, 21-30, 21-29, 21-28, 21-27, 21-26, 21-25, 21-24, 21-23, or 21-22 base pairs, for example, 19-21 base pairs. Thus, in one embodiment, to the extent that it becomes processed to a functional duplex, of e.g., 15-base pairs, that targets a desired RNA for cleavage, an RNA molecule or complex of RNA molecules having a duplex region greater than 30 base pairs is a dsRNA. Thus, an ordinarily skilled artisan recognizes that in one embodiment, a miRNA is a dsRNA. In another embodiment, a dsRNA is not a naturally occurring miRNA. In another embodiment, an RNAi agent useful to target LRRK2 expression is not generated in the target cell by cleavage of a larger dsRNA.

[0236] A dsRNA as described herein can further include one or more single-stranded nucleotide overhangs e.g., 1, 2, 3, or 4 nucleotides. A nucleotide overhang can comprise or consist of a nucleotide/nucleoside analog, including a deoxynucleotide/nucleoside. The overhang(s) can be on the sense strand, the antisense strand or any combination thereof. Furthermore, the nucleotide(s) of an overhang can be present on the 5′-end, 3′-end or both ends of either an antisense or sense strand of a dsRNA.

[0237] A dsRNA can be synthesized by standard methods known in the art. Double stranded RNAi compounds of the invention may be prepared using a two-step procedure. First, the individual strands of the double stranded RNA molecule are prepared separately. Then, the component strands are annealed. The individual strands of the dsRNA compound can be prepared using solution-phase or solid-phase organic synthesis or both. Organic synthesis offers the advantage that the oligonucleotide strands comprising unnatural or modified nucleotides can be easily prepared. Similarly, single-stranded oligonucleotides of the invention can be prepared using solution-phase or solid-phase organic synthesis or both.

[0238] In one aspect, a dsRNA of the disclosure includes at least two nucleotide sequences, a sense sequence and an antisense sequence. The sense strand sequence for LRRK2 may be selected from the group of sequences provided in any one of Tables 3-7, and the corresponding nucleotide sequence of the antisense strand of the sense strand may be selected from the group of sequences of any one of Tables 3-7. In this aspect, one of the two sequences is complementary to the other of the two sequences, with one of the sequences being substantially complementary to a sequence of an mRNA generated in the expression of a LRRK2 gene. As such, in this aspect, a dsRNA includes two oligonucleotides, where one oligonucleotide is described as the sense strand (passenger strand) in any one of Tables 3-7, and the second oligonucleotide is described as the corresponding antisense strand (guide strand) of the sense strand in any one of Tables 3-7.

[0239] In one embodiment, the substantially complementary sequences of the dsRNA are contained on separate oligonucleotides. In another embodiment, the substantially complementary sequences of the dsRNA are contained on a single oligonucleotide.

[0240] It will be understood that, although the sequences in Table 5 and 7 are described as modified or conjugated sequences, the RNA of the RNAi agent of the disclosure e.g., a dsRNA of the disclosure, may comprise any one of the sequences set forth in any one of Tables 3-4 and 6 that is un-modified, un-conjugated, or modified or conjugated differently than described therein. For example, although the sense strands of the agents of the invention may be conjugated to a GalNAc ligand, these agents may be conjugated to a moiety that directs delivery to the CNS, e.g., a C16 ligand, as described herein. In one embodiment, the lipophilic moiety contains a saturated or unsaturated C16 hydrocarbon chain (e.g., a linear C16 alkyl or alkenyl). A lipophilic ligand can be included in any of the positions provided in the instant application. In some embodiments, the lipophilic moiety is conjugated to a nucleobase, sugar moiety, or internucleosidic linkage of the double-stranded iRNA agent. For example, a C16 ligand may be conjugated via the 2′-oxygen of a ribonucleotide as shown in the following structure:

[chemical structure]

where * denotes a bond to an adjacent nucleotide, and B is a nucleobase or a nucleobase analog, optionally where B is adenine, guanine, cytosine, thymine or uracil. Design and Synthesis of the ligands and monomers provided herein are described, for example, in PCT publication Nos. WO2019/217459, WO2020/132227, and WO2020/257194, contents of which are incorporated herein by reference in their entirety.

[0241] In some embodiments, the double-stranded iRNA agent further comprises a phosphate or phosphate mimic at the 5′-end of the antisense strand. In one embodiment, the phosphate mimic is a 5′-vinyl phosphonate (VP). In some embodiments, the 5′-end of the antisense strand of the double-stranded iRNA agent does not contain a 5′-vinyl phosphonate (VP).

[0242] The skilled person is well aware that dsRNAs having a duplex structure of about 20 to 23 base pairs, e.g., 21, base pairs have been hailed as particularly effective in inducing RNA interference (Elbashir et al., (2001) EMBO J., 20:6877-6888). However, others have found that shorter or longer RNA duplex structures can also be effective (Chu and Rana (2007) RNA 14:1714-1719; Kim et al. (2005) Nat Biotech 23:222-226). In the embodiments described above, by virtue of the nature of the oligonucleotide sequences provided herein, dsRNAs described herein can include at least one strand of a length of minimally 21 nucleotides. It can be reasonably expected that shorter duplexes minus only a few nucleotides on one or both ends can be similarly effective as compared to the dsRNAs described above. Hence, dsRNAs having a sequence of at least 15, 16, 17, 18, 19, 20, or more contiguous nucleotides derived from one of the sequences provided herein, and differing in their ability to inhibit the expression of a LRRK2 gene by at least about 25%, at least about 30%, at least about 40%, at least about 50%, at least about 60%, at least about 70%, at least about 80%, at least about 90%, or at least about 95% inhibition relative to a control level, from a dsRNA comprising the full sequence using the in vitro assay with, e.g., A549 cells and a 10 nM concentration of the RNA agent and the PCR assay as provided in the examples herein, are contemplated to be within the scope of the present disclosure. In some embodiments, inhibition from a dsRNA comprising the full sequence was measured using the in vitro assay with primary mouse hepatocytes.

[0243] In addition, the RNA agents described herein identify a site(s) in a LRRK2 mRNA transcript that is susceptible to RISC-mediated cleavage. As such, the present disclosure further features RNAi agents that target within this site(s). As used herein, an RNAi agent is said to “target within” a particular site of an mRNA transcript if the RNAi agent promotes cleavage of the mRNA transcript anywhere within that particular site. Such an RNAi agent generally includes at least about 15 contiguous nucleotides, preferably at least 19 nucleotides, from one of the sequences provided herein coupled to additional nucleotide sequences taken from the region contiguous to the selected sequence in a LRRK2 gene.

[0244] An RNA target may have regions, or spans of the target RNA's nucleotide sequence, which are relatively more susceptible or amenable than other regions of the RNA target to mediating cleavage of the RNA target via RNA interference induced by the binding of an RNAi agent to that region. The increased susceptibility to RNA interference within such “hotspot regions” (or simply “hotspots”) means that iRNA agents targeting the region will likely have higher efficacy in inducing iRNA interference than iRNA agents which target other regions of the target RNA. For example, without being bound by theory, the accessibility of a target region of a target RNA may influence the efficacy of iRNA agents which target that region, with some hotspot regions having increased accessibility. Secondary structures, for instance, that form in the RNA target (e.g., within or proximate to hotspot regions) may affect the ability of the iRNA agent to bind the target region and induce RNA interference.

[0245] According to certain aspects of the invention, an iRNA agent may be designed to target a hotspot region of any of the target RNAs described herein, including any identified portions of a target RNA (e.g., a particular exon). As used herein, a hotspot region may refer to an approximately 19-200, 19-150, 19-100, 19-75, 19-50, 21-200, 21-150, 21-100, 21-75, 21-50, 50-200, 50-150, 50-100, 50-75, 75-200, 75-150, 75-100, 100-200, or 100-150 nucleotide region of a target RNA sequence for which targeting using RNAi agents provides an observably higher probability of efficacious silencing relative to targeting other regions of the same target RNA. According to certain aspects of the invention, a hotspot region may comprise a limited region of the target RNA, and in some cases, a substantially limited region of the target, including for example, less than half of the length of the target RNA, such as about 5%, 10%, 15%, 20%, 25%, or 30% of the length of the target RNA. Conversely, the other regions against which a hotspot is compared may cumulatively comprise at least a majority of the length of the target RNA. For example, the other regions may cumulatively comprise at least about 60%, or at least about 70%, or at least about 80%, or at least about 90%, or at least about 95% of the length of the target RNA.

[0246] Compared regions of the target RNA may be empirically evaluated for identification of hotspots using efficacy data obtained from in vitro or in vivo screening assays. For example, RNAi agents targeting various regions that span a target RNA may be compared for frequency of efficacious iRNA agents (e.g., the amount by which target gene expression is inhibited, such as measured by mRNA expression or protein expression) that bind each region. In general, a hotspot can be recognized by observing clustering of multiple efficacious RNAi agents that bind to a limited region of the RNA target. A hotspot may be sufficiently characterized as such by observing efficacy of iRNA agents which cumulatively span at least about 60% of the target region identified as a hotspot, such as about 70%, about 80%, about 90%, or about 95% or more of the length of the region, including both ends of the region (i.e. at least about 60%, 70%, 80%, 90%, or 95% or more of the nucleotides within the region, including the nucleotides at each end of the region, were targeted by an iRNA agent). According to some aspects of the invention, an iRNA agent which demonstrates at least about 50%, 55%, 60%, 65%, 70%, 75%, 80%, 85%, 90%, or 95% inhibition over the region (e.g., no more than about 50%, 45%, 40%, 35%, 30%, 25%, 20%, 15%, 10%, or 5% mRNA remaining) may be identified as efficacious.

[0247] Amenability to targeting of RNA regions may also be assessed using quantitative comparison of inhibition measurements across different regions of a defined size (e.g., 25, 30, 40, 50, 60, 70, 80, 90, or 100, 110, 120, 130, 140, 150, 160, 170, 180, 190, or 200 nts). For example, an average level of inhibition may be determined for each region and the averages of each region may be compared. The average level of inhibition within a hotspot region may be substantially higher than the average of averages for all evaluated regions. According to some aspects, the average level of inhibition in a hotspot region may be at least about 10%, 20%, 30%, 40%, or 50% higher than the average of averages. According to some aspects, the average level of inhibition in a hotspot region may be at least about 1.0, 1.1, 1.2, 1.3, 1.4, 1.5 1.6, 1.7, 1.8, 1.9, or 2.0 standard deviations above the average of averages. The average level of inhibition may be higher by a statistically significant (e.g., p<0.05) amount. According to some aspects, each inhibition measurement within a hotspot region may be above a threshold amount (e.g., at or below a threshold amount of mRNA remaining), According to some aspects, each inhibition measurement within the region may be substantially higher than an average of all inhibition measurements across all the measured regions. For example, each inhibition measurement in a hotspot region may be at least about 10%, 20%, 30%, 40%, or 50% higher than the average of all inhibition measurements. According to some aspects, each inhibition measurement may be at least about 1.0, 1.1, 1.2, 1.3, 1.4, 1.5 1.6, 1.7, 1.8, 1.9, or 2.0 standard deviations above the average of all inhibition measurements. Each inhibition measurement may be higher by a statistically significant (e.g., p<0.05) amount than the average of all inhibition measurements. A standard for evaluating a hotspot may comprise various combinations of the above standards where compatible (e.g., an average level of inhibition of at least about a first amount and having no inhibition measurements below a threshold level of a second amount, lesser than the first amount).

[0248] It is therefore expressly contemplated that any iRNA agent, including the specific exemplary iRNA agents described herein, which targets a hotspot region of a target RNA, may be preferably selected for inducing RNA interference of the target mRNA as targeting such a hotspot region is likely to exhibit a robust inhibitory response relative to targeting a region which is not a hotspot region. RNAi agents targeting target sequences that substantially overlap (e.g., by at least about 70%, 75%, 80%, 85%, 90%, 95% of the target sequence length) or, preferably, that reside fully within the hotspot region may be considered to target the hotspot region. Hotspot regions of the RNA target(s) of the instant invention may include any region for which the data disclosed herein demonstrates higher frequency of targeting by efficacious RNAi agents, including by any of the standards described elsewhere herein, whether or not the range(s) of such hotspot region(s) are explicitly specified.

[0249] In various embodiments, a dsRNA agent of the present invention targets a hotspot region of an mRNA encoding LRRK2. In one embodiment, the hotspot region comprises nucleotides 3620-3652, 3794-3849, 5194-5222, 5366-5393, 5423-5463, 5674-5704, 5720-5745, 6090-6114, 6125-6156, 6518-6561, 6721-6750, 6740-6763, 7016-7061, 7083-7123, 7112-7136, 7125-7169, 7346-7373, 7441-7465, 7591-7659, 7636-7659, 8132-8155, 3627-3650, 5194-5222, 5674-5702, 5720-5745, 6091-6114, 6529-6559, 7034-7061, 7441-7465, and 7636-7659 of SEQ ID NO: 1. The dsRNA agent may be selected from the group consisting of AD-1627308, AD-1631049, AD-1631050, AD-1626349, AD-1626353, AD-1626375, AD-1626382, AD-1631080, AD-1807348, AD-1807393, AD-1631088, AD-1631089, AD-1631090, AD-1631108, AD-1807416, AD-1807371, AD-1627767, AD-1627769, AD-1627772, AD-1631109, AD-1631110, AD-1631111, AD-1627820, AD-1627838, AD-1628042, AD-1628043, AD-1628044, AD-1628050, AD-1628052, AD-1628070, AD-1631108, AD-1631109, AD-1631110, AD-1631111, AD-1807397, AD-1807352, AD-1628073, AD-1807374, AD-1807419, AD-1628381, AD-1628382, AD-1628383, AD-1631131, AD-1631132, AD-1631133, AD-1628396, AD-1807361, AD-1807406, AD-1631150, AD-1631151, AD-1631152, AD-1631153, AD-1631154, AD-1631155, AD-1631156, AD-1631157, AD-1631158, AD-1631160, AD-1631161, AD-1631162, AD-1807357, AD-1807402, AD-1628961, AD-1628963, AD-1629214, AD-1629216, AD-1629223, AD-1629224, AD-1629263, AD-1629280, AD-1631194, AD-1631195, AD-1631196, AD-1631197, AD-1807363, AD-1807408, AD-1629304, AD-1629524, AD-1631205, AD-1631206, AD-1807337, AD-1807354, AD-1807382, AD-1807399, AD-1629619, AD-1629620, AD-1629621, AD-1631210, AD-1807355, AD-1807377, AD-1807400, AD-1807422, AD-1629763, AD-1631215, AD-1631216, AD-1631217, AD-1807335, AD-1807336, AD-1807376, AD-1807380, AD-1807381, AD-1807421, AD-1630135, AD-1630136, AD-1631221, AD-1807369, AD-1807414, AD-1807364, AD-1807409, AD-1629808, and AD-1629809.

### III. Modified RNAi Agents of the Disclosure

[0250] In one embodiment, the RNA of the RNAi agent of the disclosure e.g., a dsRNA, is un-modified, and does not comprise modified nucleotides, e.g., chemical modifications or conjugations known in the art and described herein. In preferred embodiments, the RNA of an RNAi agent ofthe disclosure, e.g., a dsRNA, is chemically modified to enhance stability or other beneficial characteristics. In certain embodiments of the disclosure, substantially all of the nucleotides of an RNAi agent of the disclosure are modified. In other embodiments of the disclosure, all of the nucleotides of an RNAi agent of the disclosure are modified. RNAi agents of the disclosure in which “substantially all of the nucleotides are modified” are largely but not wholly modified and can include not more than 5, 4, 3, 2, or unmodified nucleotides. In still other embodiments of the disclosure, RNAi agents of the disclosure can include not more than 5, 4, 3, 2 or 1 modified nucleotides.

[0251] The nucleic acids featured in the disclosure can be synthesized or modified by methods well established in the art, such as those described in “Current protocols in nucleic acid chemistry,” Beaucage, S. L. et al. (Edrs.), John Wiley & Sons, Inc., New York, NY, USA, which is hereby incorporated herein by reference. Modifications include, for example, end modifications, e.g., 5′-end modifications (phosphorylation, conjugation, inverted linkages) or 3′-end modifications (conjugation, DNA nucleotides, inverted linkages, etc.); base modifications, e.g., replacement with stabilizing bases, destabilizing bases, or bases that base pair with an expanded repertoire of partners, removal of bases (abasic nucleotides), or conjugated bases; sugar modifications (e.g., at the 2′-position or 4′-position) or replacement of the sugar; or backbone modifications, including modification or replacement of the phosphodiester linkages. Specific examples of RNAi agents useful in the embodiments described herein include, but are not limited to, RNAs containing modified backbones or no natural internucleoside linkages. RNAs having modified backbones include, among others, those that do not have a phosphorus atom in the backbone. For the purposes of this specification, and as sometimes referenced in the art, modified RNAs that do not have a phosphorus atom in their internucleoside backbone can also be considered to be oligonucleosides. In some embodiments, a modified RNAi agent has a phosphorus atom in its internucleoside backbone.

[0252] Modified RNA backbones include, for example, phosphorothioates, chiral phosphorothioates, phosphorodithioates, phosphotriesters, aminoalkylphosphotriesters, methyl and other alkyl phosphonates including 3′-alkylene phosphonates and chiral phosphonates, phosphinates, phosphoramidates including 3′-amino phosphoramidate and aminoalkylphosphoramidates, thionophosphoramidates, thionoalkylphosphonates, thionoalkylphosphotriesters, and boranophosphates having normal 3′-5′ linkages, 2′-5′-linked analogs of these, and those having inverted polarity wherein the adjacent pairs of nucleoside units are linked 3′-5′ to 5′-3′ or 2′-5′ to 5′-2′. Various salts, mixed salts and free acid forms are also included. In some embodiments of the invention, the dsRNA agents of the invention are in a free acid form. In other embodiments of the invention, the dsRNA agents of the invention are in a salt form. In one embodiment, the dsRNA agents of the invention are in a sodium salt form. In certain embodiments, when the dsRNA agents of the invention are in the sodium salt form, sodium ions are present in the agent as counterions for substantially all of the phosphodiester and/or phosphorothiotate groups present in the agent. Agents in which substantially all of the phosphodiester and/or phosphorothioate linkages have a sodium counterion include not more than 5, 4, 3, 2, or 1 phosphodiester and/or phosphorothioate linkages without a sodium counterion. In some embodiments, when the dsRNA agents of the invention are in the sodium salt form, sodium ions are present in the agent as counterions for all of the phosphodiester and/or phosphorothiotate groups present in the agent.

[0253] Representative U.S. patents that teach the preparation of the above phosphorus-containing linkages include, but are not limited to, U.S. Pat. Nos. 3,687,808; 4,469,863; 4,476,301; 5,023,243; 5,177,195; 5,188,897; 5,264,423; 5,276,019; 5,278,302; 5.286,717; 5,321,131; 5,399,676; 5,405,939; 5,453,496; 5,455,233; 5,466,677; 5,476,925; 5,519,126; 5,536,821; 5,541,316; 5,550,111; 5,563,253; 5,571,799; 5,587,361; 5,625,050; 6,028,188; 6,124,445; 6,160,109; 6,169,170; 6,172,209; 6, 239,265; 6,277,603; 6,326,199; 6,346,614; 6,444,423; 6,531,590; 6.534,639; 6,608,035; 6,683,167; 6,858,715; 6,867,294; 6,878,805; 7,015,315; 7,041,816; 7,273,933; 7,321,029; and U.S. Pat. RE39464, the entire contents of each of which are hereby incorporated herein by reference.

[0254] Modified RNA backbones that do not include a phosphorus atom therein have backbones that are formed by short chain alkyl or cycloalkyl internucleoside linkages, mixed heteroatoms and alkyl or cycloalkyl internucleoside linkages, or one or more short chain heteroatomic or heterocyclic internucleoside linkages. These include those having morpholino linkages (formed in part from the sugar portion of a nucleoside); siloxane backbones; sulfide, sulfoxide and sulfone backbones; formacetyl and thioformacetyl backbones; methylene formacetyl and thioformacetyl backbones; alkene containing backbones; sulfamate backbones; methyleneimino and methylenehydrazino backbones; sulfonate and sulfonamide backbones; amide backbones; and others having mixed N, O, S and CH₂ component parts.

[0255] Representative U.S. patents that teach the preparation of the above oligonucleosides include, but are not limited to, U.S. Pat. Nos. 5,034,506; 5,166,315; 5,185,444; 5,214,134; 5,216,141; 5,235,033; 5,64,562; 5,264,564; 5,405,938; 5,434,257; 5,466,677; 5,470,967; 5,489,677; 5,541,307; 5,561,225; 5,596,086; 5,602,240; 5,608,046; 5,610,289; 5,618,704; 5,623,070; 5,663,312; 5,633,360; 5,677,437; and, 5,677,439, the entire contents of each of which are hereby incorporated herein by reference.

[0256] In other embodiments, suitable RNA mimetics are contemplated for use in RNAi agents, in which both the sugar and the internucleoside linkage, i.e., the backbone, of the nucleotide units are replaced with alternate groups. The nucleobase units are maintained for hybridization with an appropriate nucleic acid target compound. One such oligomeric compound, a RNA mimetic that has been shown to have excellent hybridization properties, is referred to as a peptide nucleic acid (PNA). In PNA compounds, the sugar backbone of an RNA is replaced with an amide containing backbone, in particular an aminoethylglycine backbone. The nucleobases are retained and are bound directly or indirectly to aza nitrogen atoms of the amide portion of the backbone. Representative U.S. patents that teach the preparation of PNA compounds include, but are not limited to, U.S. Pat. Nos. 5,539,082; 5,714,331; and 5,719,262, the entire contents of each of which are hereby incorporated herein by reference. Additional PNA compounds suitable for use in the RNAi agents of the disclosure are described in, for example, in Nielsen et al., Science, 1991, 254, 1497-1500.

[0257] Some embodiments featured in the disclosure include RNAs with phosphorothioate backbones and oligonucleosides with heteroatom backbones, and in particular —CH₂—NH—CH₂—, —CH₂—N(CH₃)—O—CH₂—[known as a methylene(methylimino) or MMI backbone], —CH₂—O—N(CH₃)—CH₂—, —CH₂—N(CH₃)—N(CH₃)—CH₂—and —N(CH₃)—CH₂—CH₂—of the above-referenced U.S. Pat. No. 5,489,677, and the amide backbones of the above-referenced U.S. Pat. No. 5,602,240. In some embodiments, the RNAs featured herein have morpholino backbone structures of the above-referenced U.S. Pat. No. 5,034,506. The native phosphodiester backbone can be represented as —O—P(O)(OH)—OCH₂—.

[0258] Modified RNAs can also contain one or more substituted sugar moieties. The RNAi agents, e.g., dsRNAs, featured herein can include one of the following at the 2-position: OH; F; O—, S—, or N-alkyl; O—, S—, or N-alkenyl; O—, S- or N-alkynyl; or O-alkyl-O-alkyl, wherein the alkyl, alkenyl and alkynyl can be substituted or unsubstituted C₁ to C₁₀ alkyl or C₂ to C₁₀ alkenyl and alkynyl. Exemplary suitable modifications include O[(CH₂)ₙO]ₘCH₃, O(CH₂)ₙOCH₃, O(CH₂)ₙNH₂, O(CH₂)ₙCH₃, O(CH₂)ₙONH₂, and O(CH₂)ₙON[(CH₂)ₙCH₃)]₂, where n and m are from 1 to about 10. In other embodiments, dsRNAs include one of the following at the 2′ position: C₁, to C₁₀ alkyl, substituted alkyl, alkaryl, aralkyl, O-alkaryl or O-aralkyl, SH, SCH₃, OCN, Cl, Br, CN, CF₃, OCF₃, SOCH₃, SO₂CH₃, ONO₂, NO₂, N₃, NH₂, heterocycloalkyl, heterocycloalkaryl, aminoalkylamino, polyalkylamino, substituted silyl, an RNA cleaving group, a reporter group, an intercalator, a group for improving the pharmacokinetic properties of an RNAi agent, or a group for improving the pharmacodynamic properties of an RNAi agent, and other substituents having similar properties. In some embodiments, the modification includes a 2′-methoxyethoxy (2′-O—CH₂CH₂OCH₃, also known as 2′-O-(2-methoxyethyl) or 2′-MOE) (Martin et al., Helv. Chim. Acta, 1995, 78:486-504) i.e., an alkoxy-alkoxy group. Another exemplary modification is 2′-dimethylaminooxyethoxy, i.e., a O(CH₂)₂ON(CH₃)₂ group, also known as 2′-DMAOE, as described in examples herein below, and 2′-dimethylaminoethoxyethoxy (also known in the art as 2′-O-dimethylaminoethoxvethyl or 2′-DMAEOE), i.e., 2′-O—CH₂—O—CH₂—N(CH₃)₂. Further exemplary modifications include: 5′-Me-2′-F nucleotides, 5′-Me-2′-OMe nucleotides, 5′-Me-2′-deoxynucleotides, (both R and S isomers in these three families); 2′-alkoxyalkyl; and 2′-NMA (N-methylacetamide).

[0259] Other modifications include 2′-methoxy (2′-OCH₃), 2′-aminopropoxy (2′-OCH₂CH₂CH₂NH₂), 2′-O-hexadecyl, and 2′-fluoro (2′-F). Similar modifications can also be made at other positions on the RNA of an RNAi agent, particularly the 3′ position of the sugar on the 3′ terminal nucleotide or in 2′-5′ linked dsRNAs and the 5′ position of 5′ terminal nucleotide. RNAi agents can also have sugar mimetics such as cyclobutyl moieties in place of the pentofuranosyl sugar. Representative U.S. patents that teach the preparation of such modified sugar structures include, but are not limited to, U.S. Pat. Nos. 4,981,957; 5,118,800; 5,319,080; 5,359,044; 5,393,878; 5,446,137; 5,466,786; 5,514,785; 5,519,134; 5,567,811; 5,576,427; 5,591,722; 5,597,909; 5,610,300; 5,627,053; 5,639,873; 5,646,265; 5,658,873; 5,670,633; and 5,700,920, certain of which are commonly owned with the instant application. The entire contents of each of the foregoing are hereby incorporated herein by reference.

[0260] An RNAi agent of the disclosure can also include nucleobase (often referred to in the art simply as “base”) modifications or substitutions. As used herein, “unmodified” or “natural” nucleobases include the purine bases adenine (A) and guanine (G), and the pyrimidine bases thymine (T), cytosine (C) and uracil (U). Modified nucleobases include other synthetic and natural nucleobases such as 5-methylcytosine (5-me-C), 5-hydroxymethyl cytosine, xanthine, hypoxanthine, 2-aminoadenine, 6-methyl and other alkyl derivatives of adenine and guanine, 2-propyl and other alkyl derivatives of adenine and guanine, 2-thiouracil, 2-thiothymine and 2-thiocytosine, 5-halouracil and cytosine, 5-propynyl uracil and cytosine, 6-azo uracil, cytosine and thymine, 5-uracil (pseudouracil), 4-thiouracil, 8-halo, 8-amino, 8-thiol, 8-thioalkyl, 8-hydroxyl anal other 8-substituted adenines and guanines, 5-halo, particularly 5-bromo, 5-trifluoromethyl and other 5-substituted uracils and cytosines, 7-methylguanine and 7-methyladenine, 8-azaguanine and 8-azaadenine, 7-deazaguanine and 7-daazaadenine and 3-deazaguanine and 3-deazaadenine. Further modified nucleobases include those disclosed in U.S. Pat. No. 3,687,808, those disclosed in Modified Nucleosides in Biochemistry, Biotechnology and Medicine, Herdewijn, P. ed. Wiley-VCH, 2008; those disclosed in The Concise Encyclopedia Of Polymer Science And Engineering, pages 858-859, Kroschwitz, J. L, ed. John Wiley & Sons, 1990, these disclosed by Englisch et al., (1991) Angewandte Chemie, International Edition, 30:613, and those disclosed by Sanghvi, Y S., Chapter 15, dsRNA Research and Applications, pages 289-302, Crooke, S. T. and Lebleu, B., Ed., CRC Press, 1993. Certain of these modified nucleobases are particularly useful for increasing the binding affinity of the oligomeric compounds featured in the disclosure. These include 5-substituted pyrimidines, 6-azapyrimidines and N-2, N-6 and 0-6 substituted purines, including 2-aminopropyladenine, 5-propynyluracil and 5-propynylcytosine. 5-methylcytosine substitutions have been shown to increase nucleic acid duplex stability by 0.6-1.2° C. (Sanghvi, Y. S., Crooke, S. T. and Lebleu, B., Eds., dsRNA Research and Applications, CRC Press, Boca Raton, 1993, pp. 276-278) and are exemplary base substitutions, even more particularly when combined with 2′-O-methoxyethyl sugar modifications.

[0261] Representative U.S. patents that teach the preparation of certain of the above noted modified nucleobases as well as other modified nucleobases include, but are not limited to, the above noted U.S. Pat. Nos. 3,687,808, 4,845,205; 5,130,302; 5,134,066; 5,175,273; 5,367,066; 5,432,272; 5,457,187; 5,459,255; 5,484,908; 5,502,177; 5,525,711; 5,552,540; 5,587,469; 5,594,121, 5,596,091; 5,614,617; 5,681,941; 5,750,692; 6,015,886; 6,147,200; 6,166,197; 6,222,025; 6,235,887; 6,380,368; 6,528,640; 6,639,062; 6,617,438; 7,045,610; 7,427,672; and 7,495,088, the entire contents of each of which are hereby incorporated herein by reference.

[0262] An RNAi agent of the disclosure can also be modified to include one or more bicyclic sugar moieties. A “bicyclic sugar” is a furanosyl ring modified by the bridging of two atoms. A “bicyclic nucleoside” (“BNA”) is a nucleoside having a sugar moiety comprising a bridge connecting two carbon atoms of the sugar ring, thereby forming a bicyclic ring system. In certain embodiments, the bridge connects the 4′-carbon and the 2′-carbon of the sugar ring. Thus, in some embodiments an agent of the disclosure may include one or more locked nucleic acids (LNA). A locked nucleic acid is a nucleotide having a modified ribose moiety in which the ribose moiety comprises an extra bridge connecting the 2′ and 4′ carbons. In other words, an LNA is a nucleotide comprising a bicyclic sugar moiety comprising a 4′-CH₂-O-2′ bridge. This structure effectively “locks” the ribose in the 3′-endo structural conformation. The addition of locked nucleic acids to siRNAs has been shown to increase siRNA stability in serum, and to reduce off-target effects (Elmen, J. et al., (2005) Nucleic Acids Research 33(1):439-447; Mook, O R. et al., (2007) Mol Canc Ther 6(3):833-843; Grunweller, A. et al., (2003) Nucleic Acids Research 31(12):3185-3193). Examples of bicyclic nucleosides for use in the polynucleotides of the disclosure include without limitation nucleosides comprising a bridge between the 4′ and the 2′ ribosyl ring atoms. In certain embodiments, the antisense polynucleotide agents of the disclosure include one or more bicyclic nucleosides comprising a 4′ to 2′ bridge. Examples of such 4′ to 2′ bridged bicyclic nucleosides, include but are not limited to 4′-(CH₂)—O-2′ (LNA); 4′-(CH₂)—S-2′; 4′-(CH₂)₂-O-2′ (ENA); 4′-CH(CH₃)—O-2′ (also referred to as “constrained ethyl” or “cEt”) and 4′-CH(CH₂OCH₃)—O-2′ (and analogs thereof; see. e.g., U.S. Pat. No. 7,399,845); 4′-C(CH₃)(CH₃)—O-2′ (and analogs thereof; see e.g., U.S. Pat. No. 8,278,283); 4′-CH₂—N(OCH₃)-2′ (and analogs thereof; see e.g., U.S. Pat. No. 8,278,425); 4′-CH₂—O—N(CH₃)-2′ (see, e.g., U.S. Patent Publication No. 2004/0171570); 4′-CH₂—N(R)—O-2′, wherein R is H, C1-C₁₂ alkyl, or a protecting group (see, e.g., U.S. Pat. No. 7,427,672); 4′-CH₂—C(H)(CH₃)-2′ (see, e.g., Chattopadhvaya et al., J. Org. Chem., 2009, 74, 118-134); and 4′-CH₂—C(═CH₂)-2′ (and analogs thereof; see, e.g., U.S. Pat. No. 8,278,426). The entire contents of each of the foregoing are hereby incorporated herein by reference.

[0263] Additional representative US Patents and US Patent Publications that teach the preparation of locked nucleic acid nucleotides include, but are not limited to, the following: U.S. Pat. Nos. 6,268,490; 6,525,191; 6,670,461; 6,770,748; 6,794,499; 6,998,484; 7,053,207; 7,034,133; 7,084,125; 7,399,845; 7,427,672; 7,569,686; 7,741,457; 8,022,193; 8,030,467; 8,278,425; 8,278,426; 8,278,283; US 2008/0039618; and US 2009/0012281, the entire contents of each of which are hereby incorporated herein by reference.

[0264] Any of the foregoing bicyclic nucleosides can be prepared having one or more stereochemical sugar configurations including for example α-L-ribofuranose and β-D-ribofuranose (see WO 99/14226).

[0265] An RNAi agent of the disclosure can also be modified to include one or more constrained ethyl nucleotides. As used herein, a “constrained ethyl nucleotide” or “cEt” is a locked nucleic acid comprising a bicyclic sugar moiety comprising a 4′-CH(CH₃)—O-2′ bridge. In one embodiment, a constrained ethyl nucleotide is in the S conformation referred to herein as “S-cEt.”

[0266] An RNAi agent of the disclosure may also include one or more “conformationally restricted nucleotides” (“CRN”). CRN are nucleotide analogs with a linker connecting the C2′ and C4′ carbons of ribose or the C3 and —C5′ carbons of ribose. CRN lock the ribose ring into a stable conformation and increase the hybridization affinity to mRNA. The linker is of sufficient length to place the oxygen in an optimal position for stability and affinity resulting in less ribose ring puckering.

[0267] Representative publications that teach the preparation of certain of the above noted CRN include, but are not limited to, US 2013/0190383; and WO 2013/036868, the entire contents of each of which are hereby incorporated herein by reference.

[0268] In some embodiments, an RNAi agent of the disclosure comprises one or more monomers that are UNA (unlocked nucleic acid) nucleotides. UNA is unlocked acyclic nucleic acid, wherein any of the bonds of the sugar has been removed, forming an unlocked “sugar” residue. In one example, UNA also encompasses monomer with bonds between C1′—C4′ have been removed (i.e. the covalent carbon-oxygen-carbon bond between the C1′ and C4′ carbons). In another example, the C2′—C3′ bond (i.e. the covalent carbon-carbon bond between the C2′ and C3′ carbons) of the sugar has been removed (see Nuc. Acids Symp. Series, 52, 133-134 (2008) and Fluiter et al., Mol. Biosyst., 2009, 10, 1039 hereby incorporated by reference).

[0269] Representative U.S. publications that teach the preparation of UNA include, but are not limited to, U.S. Pat. No. 8,314,227; and US Patent Publication Nos. 2013/0096289; 2013/0011922; and 2011/0313020, the entire contents of each of which are hereby incorporated herein by reference.

[0270] An RNAi agent of the disclosure may also include one or more “cyclohexene nucleic acids” or (“CeNA”). CeNA are nucleotide analogs with a replacement of the furanose moiety of DNA by a cyclohexene ring. Incorporation of cylcohexenyl nucleosides in a DNA chain increases the stability of a DNA/RNA hybrid. CeNA is stable against degradation in serum and a CeNA/RNA hybrid is able to activate E. Coli RNase H, resulting in cleavage of the RNA strand. (see Wang et al., Am. Chem. Soc. 2000, 122, 36, 8595-8602, hereby incorporated by reference).

[0271] Potentially stabilizing modifications to the ends of RNA molecules can include N-(acetylaminocaproyl)-4-hydroxyprolinol (Hyp-C6-NHAc), N-(caproyl-4-hydroxyprolinol (Hyp-C6), N-(acetyl-4-hydroxyprolinol (Hyp-NHAc), thymidine-2′-O-deoxythymidine (ether), N-(aminocaproyl)-4-hydroxyprolinol (Hyp-C6-amino), 2-docosanoyl-uridine-3″-phosphate, inverted base dT(idT) and others. Disclosure of this modification can be found in WO 2011/005861.

[0272] Other modifications of an RNAi agent of the disclosure include a 5′ phosphate or 5′ phosphate mimic, e.g., a 5′-terminal phosphate or phosphate mimic on the antisense strand of an RNAi agent. Suitable phosphate mimics are disclosed in, for example US 2012/0157511, the entire contents of which are incorporated herein by reference.

A. Modified RNAi agents Comprising Motifs of the Disclosure

[0273] In certain aspects of the disclosure, the double-stranded RNAi agents of the disclosure include agents with chemical modifications as disclosed, for example, in WO 2013/075035, the entire contents of which are incorporated herein by reference. As shown herein and in WO 2013/075035, one or more motifs of three identical modifications on three consecutive nucleotides may be introduced into a sense strand or antisense strand of an RNAi agent, particularly at or near the cleavage site. In some embodiments, the sense strand and antisense strand of the RNAi agent may otherwise be completely modified. The introduction of these motifs interrupts the modification pattern, if present, of the sense or antisense strand. The RNAi agent may be optionally conjugated with a lipophilic ligand, e.g., a C16 ligand, for instance on the sense strand. The RNAi agent may be optionally modified with a (S)-glycol nucleic acid (GNA) modification, for instance on one or more residues of the antisense strand. The resulting RNAi agents may present improved gene silencing activity.

[0274] Accordingly, the disclosure provides double stranded RNAi agents capable of inhibiting the expression of a target gene (i.e., a LRRK2 gene) in vivo. The RNAi agent comprises a sense strand and an antisense strand. Each strand of the RNAi agent may be 15-30 nucleotides in length. For example, each strand may be 16-30 nucleotides in length, 17-30 nucleotides in length, 25-30 nucleotides in length, 27-30 nucleotides in length, 17-23 nucleotides in length, 17-21 nucleotides in length, 17-19 nucleotides in length, 19-25 nucleotides in length, 19-23 nucleotides in length, 19-21 nucleotides in length, 21-25 nucleotides in length, or 21-23 nucleotides in length. In certain embodiments, each strand is 19-23 nucleotides in length.

[0275] The sense strand and antisense strand typically form a duplex double stranded RNA (“dsRNA”), also referred to herein as an “RNAi agent.” The duplex region of an RNAi agent may be 15-30 nucleotide pairs in length. For example, the duplex region can be 16-30 nucleotide pairs in length, 17-30 nucleotide pairs in length, 27-30 nucleotide pairs in length, 17-23 nucleotide pairs in length, 17-21 nucleotide pairs in length, 17-19 nucleotide pairs in length, 19-25 nucleotide pairs in length, 19-23 nucleotide pairs in length, 19-21 nucleotide pairs in length, 21-25 nucleotide pairs in length, or 21-23 nucleotide pairs in length. In another example, the duplex region is selected from 15, 16, 17, 18, 19, 20, 21, 22, 23, 24, 25, 26, and 27 nucleotides in length. In preferred embodiments, the duplex region is 19-21 nucleotide pairs in length.

[0276] In one embodiment, the RNAi agent may contain one or more overhang regions or capping groups at the 3′-end, 5′-end, or both ends of one or both strands. The overhang can be 1-6 nucleotides in length, for instance 2-6 nucleotides in length, 1-5 nucleotides in length, 2-5 nucleotides in length, 1-4 nucleotides in length, 2-4 nucleotides in length, 1-3 nucleotides in length, 2-3 nucleotides in length, or 1-2 nucleotides in length. In preferred embodiments, the nucleotide overhang region is 2 nucleotides in length. The overhangs can be the result of one strand being longer than the other, or the result of two strands of the same length being staggered. The overhang can form a mismatch with the target mRNA or it can be complementary to the gene sequences being targeted or can be another sequence. The first and second strands can also be joined, e.g., by additional bases to form a hairpin, or by other non-base linkers.

[0277] In one embodiment, the nucleotides in the overhang region of the RNAi agent can each independently be a modified or unmodified nucleotide including, but no limited to 2′-sugar modified, such as, 2-F, 2′-O-methyl, thymidine (T), and any combinations thereof.

[0278] For example, TT can be an overhang sequence for either end on either strand. The overhang can form a mismatch with the target mRNA or it can be complementary to the gene sequences being targeted or can be another sequence.

[0279] The 5′- or 3′- overhangs at the sense strand, antisense strand or both strands of the RNAi agent may be phosphorylated. In some embodiments, the overhang region(s) contains two nucleotides having a phosphorothioate between the two nucleotides, where the two nucleotides can be the same or different. In one embodiment, the overhang is present at the 3′-end of the sense strand, antisense strand, or both strands. In one embodiment, this 3′-overhang is present in the antisense strand. In one embodiment, this 3′-overhang is present in the sense strand.

[0280] The RNAi agent may contain only a single overhang, which can strengthen the interference activity of the RNAi, without affecting its overall stability. For example, the single-stranded overhang may be located at the 3-terminal end of the sense strand or, alternatively, at the 3-terminal end of the antisense strand. The RNAi may also have a blunt end, located at the 5′-end of the antisense strand (i.e., the 3′-end of the sense strand) or vice versa. Generally, the antisense strand of the RNAi has a nucleotide overhang at the 3′-end, and the 5′-end is blunt. While not wishing to be bound by theory, the asymmetric blunt end at the 5′-end of the antisense strand and 3′-end overhang of the antisense strand favor the guide strand loading into RISC process.

[0281] In one embodiment, the RNAi agent is double blunt-ended and 19 nucleotides in length, wherein the sense strand contains at least one motif of three 2′-F modifications on three consecutive nucleotides at positions 7, 8, and 9 from the 5′end. The antisense strand contains at least one motif of three 2′-O-methyl modifications on three consecutive nucleotides at positions 11, 12, and 13 from the 5′end.

[0282] In another embodiment, the RNAi agent is double blunt-ended and 20 nucleotides in length, wherein the sense strand contains at least one motif of three 2′-F modifications on three consecutive nucleotides at positions 8, 9, and 10 from the 5′end. The antisense strand contains at least one motif of three 2′-O-methyl modifications on three consecutive nucleotides at positions 11, 12, and 13 from the 5′end.

[0283] In yet another embodiment, the RNAi agent is double blunt-ended and 21 nucleotides in length, wherein the sense strand contains at least one motif of three 2′-F modifications on three consecutive nucleotides at positions 9, 10, and 11 from the 5′end. The antisense strand contains at least one motif of three 2′-O-methyl modifications on three consecutive nucleotides at positions 11, 12, and 13 from the 5′end.

[0284] In one embodiment, the RNAi agent comprises a 21 nucleotide sense strand and a 23 nucleotide antisense strand, wherein the sense strand contains at least one motif of three 2′-F modifications on three consecutive nucleotides at positions 9, 10, and 11 from the 5′end; the antisense strand contains at least one motif of three 2′-O-methyl modifications on three consecutive nucleotides at positions 11, 12, and 13 from the 5′end, wherein one end of the RNAi agent is blunt, while the other end comprises a 2 nucleotide overhang. The 2 nucleotide overhang can be at the 3′-end of the antisense strand. When the 2 nucleotide overhang is at the 3′-end of the antisense strand, there may be two phosphorothioate internucleotide linkages between the terminal three 3′-nucleotides of the antisense strand, wherein two of the three nucleotides are the overhang nucleotides, and the third nucleotide is a paired nucleotide next to the overhang nucleotide. In one embodiment, the RNAi agent additionally has two phosphorothioate internucleotide linkages between the terminal three nucleotides at both the 5′-end of the sense strand and at the 5′-end of the antisense strand.

[0285] In one embodiment, every nucleotide in the sense strand and the antisense strand of the RNAi agent, including the nucleotides that are part of the motifs are modified nucleotides. In one embodiment each residue is independently modified with a 2′-O-methyl or 2′-fluoro, e.g., in an alternating motif. Optionally, the RNAi agent further comprises a ligand (e.g., a lipophilic ligand, optionally a C16 ligand).

[0286] In one embodiment, the RNAi agent comprises a sense and an antisense strand, wherein the sense strand is 25-30 nucleotide residues in length, wherein starting from the 5′ terminal nucleotide (position 1) positions 1 to 23 of the first strand comprise at least 8 ribonucleotides; the antisense strand is 36-66 nucleotide residues in length and, starting from the 3′ terminal nucleotide, comprises at least 8 ribonucleotides in the positions paired with positions 1-23 of sense strand to form a duplex; wherein at least the 3′terminal nucleotide of antisense strand is unpaired with sense strand, and up to 6 consecutive 3′ terminal nucleotides are unpaired with sense strand, thereby forming a 3′ single stranded overhang of 1-6 nucleotides; wherein the 5′ terminus of antisense strand comprises from 10-30 consecutive nucleotides which are unpaired with sense strand, thereby forming a 10-30 nucleotide single stranded 5′ overhang; wherein at least the sense strand 5′ terminal and 3′ terminal nucleotides are base paired with nucleotides of antisense strand when sense and antisense strands are aligned for maximum complementarity, thereby forming a substantially duplexed region between sense and antisense strands; and antisense strand is sufficiently complementary to a target RNA along at least 19 ribonucleotides of antisense strand length to reduce target gene expression when the double stranded nucleic acid is introduced into a mammalian cell; and wherein the sense strand contains at least one motif of three 2′-F modifications on three consecutive nucleotides, where at least one of the motifs occurs at or near the cleavage site. The antisense strand contains at least one motif of three 2′-O-methyl modifications on three consecutive nucleotides at or near the cleavage site.

[0287] In one embodiment, the RNAi agent comprises sense and antisense strands, wherein the RNAi agent comprises a first strand having a length which is at least 25 and at most 29 nucleotides and a second strand having a length which is at most 30 nucleotides with at least one motif of three 2′-O-methyl modifications on three consecutive nucleotides at position 11, 12, and 13 from the 5′ end; wherein the 3′ end of the first strand and the 5′ end of the second strand form a blunt end and the second strand is 1-4 nucleotides longer at its 3′ end than the first strand, wherein the duplex region which is at least 25 nucleotides in length, and the second strand is sufficiently complementary to a target mRNA along at least 19 nucleotide of the second strand length to reduce target gene expression when the RNAi agent is introduced into a mammalian cell, and wherein dicer cleavage of the RNAi agent preferentially results in an siRNA comprising the 3′ end of the second strand, thereby reducing expression of the target gene in the mammal. Optionally, the RNAi agent further comprises a ligand.

[0288] In one embodiment, the sense strand of the RNAi agent contains at least one motif of three identical modifications on three consecutive nucleotides, where one of the motifs occurs at the cleavage site in the sense strand.

[0289] In one embodiment, the antisense strand of the RNAi agent can also contain at least one motif of three identical modifications on three consecutive nucleotides, where one of the motifs occurs at or near the cleavage site in the antisense strand.

[0290] For an RNAi agent having a duplex region of 17-23 nucleotide in length, the cleavage site of the antisense strand is typically around the 10, 11 and 12 positions from the 5′-end. Thus the motifs of three identical modifications may occur at the 9, 10, and 11 positions; 10, 11, and 12 positions; 11, 12, and 13 positions; 12, 13, and 14 positions; or 13, 14, and 15 positions of the antisense strand, the count starting from the 1^{st} nucleotide from the 5′-end of the antisense strand, or, the count starting from the 1^{st} paired nucleotide within the duplex region from the 5′- end of the antisense strand. The cleavage site in the antisense strand may also change according to the length of the duplex region of the RNAi from the 5′-end.

[0291] The sense strand of the RNAi agent may contain at least one motif of three identical modifications on three consecutive nucleotides at the cleavage site of the strand; and the antisense strand may have at least one motif of three identical modifications on three consecutive nucleotides at or near the cleavage site of the strand. When the sense strand and the antisense strand form a dsRNA duplex, the sense strand and the antisense strand can be so aligned that one motif of the three nucleotides on the sense strand and one motif of the three nucleotides on the antisense strand have at least one nucleotide overlap, i.e., at least one of the three nucleotides of the motif in the sense strand forms a base pair with at least one of the three nucleotides of the motif in the antisense strand. Alternatively, at least two nucleotides may overlap, or all three nucleotides may overlap.

[0292] In one embodiment, the sense strand of the RNAi agent may contain more than one motif of three identical modifications on three consecutive nucleotides. The first motif may occur at or near the cleavage site of the strand and the other motifs may be a wing modification. The term “wing modification” herein refers to a motif occurring at another portion of the strand that is separated from the motif at or near the cleavage site of the same strand. The wing modification is either adjacent to the first motif or is separated by at least one or more nucleotides. When the motifs are immediately adjacent to each other then the chemistry of the motifs are distinct from each other and when the motifs are separated by one or more nucleotide than the chemistries can be the same or different. Two or more wing modifications may be present. For instance, when two wing modifications are present, each wing modification may occur at one end relative to the first motif which is at or near cleavage site or on either side of the lead motif.

[0293] Like the sense strand, the antisense strand of the RNAi agent may contain more than one motif of three identical modifications on three consecutive nucleotides, with at least one of the motifs occurring at or near the cleavage site of the strand. This antisense strand may also contain one or more wing modifications in an alignment similar to the wing modifications that may be present on the sense strand.

[0294] In one embodiment, the wing modification on the sense strand or antisense strand of the RNAi agent typically does not include the first one or two terminal nucleotides at the 3′-end, 5′-end or both ends of the strand.

[0295] In another embodiment, the wing modification on the sense strand or antisense strand of the RNAi agent typically does not include the first one or two paired nucleotides within the duplex region at the 3′-end, 5′-end or both ends of the strand.

[0296] When the sense strand and the antisense strand of the RNAi agent each contain at least one wing modification, the wing modifications may fall on the same end of the duplex region, and have an overlap of one, two or three nucleotides.

[0297] When the sense strand and the antisense strand of the RNAi agent each contain at least two wing modifications, the sense strand and the antisense strand can be so aligned that two modifications each from one strand fall on one end of the duplex region, having an overlap of one, two or three nucleotides; two modifications each from one strand fall on the other end of the duplex region, having an overlap of one, two or three nucleotides; two modifications one strand fall on each side of the lead motif, having an overlap of one, two, or three nucleotides in the duplex region.

[0298] In one embodiment, the RNAi agent comprises mismatch(es) with the target, within the duplex, or combinations thereof. The mismatch may occur in the overhang region or the duplex region. The base pair may be ranked on the basis of their propensity to promote dissociation or melting (e.g., on the free energy of association or dissociation of a particular pairing, the simplest approach is to examine the pairs on an individual pair basis, though next neighbor or similar analysis can also be used). In terms of promoting dissociation: A:U is preferred over G:C; G:U is preferred over G:C; and I:C is preferred over G:C (I=inosine). Mismatches, e.g., non-canonical or other than canonical pairings (as described elsewhere herein) are preferred over canonical (A:T, A:U, G:C) pairings; and pairings which include a universal base are preferred over canonical pairings.

[0299] In one embodiment, the RNAi agent comprises at least one of the first 1, 2, 3, 4, or 5 base pairs within the duplex regions from the 5′- end of the antisense strand independently selected from the group of A:U, G:U, I:C, and mismatched pairs, e.g., non-canonical or other than canonical pairings or pairings which include a universal base, to promote the dissociation of the antisense strand at the 5′-end of the duplex.

[0300] In one embodiment, the nucleotide at the 1 position within the duplex region from the 5′-end in the antisense strand is selected from the group consisting of A, dA, dU, U, and dT. Alternatively, at least one of the first 1, 2 or 3 base pair within the duplex region from the 5′- end of the antisense strand is an AU base pair. For example, the first base pair within the duplex region from the 5′- end of the antisense strand is an AU base pair.

[0301] In another embodiment, the nucleotide at the 3′-end of the sense strand is deoxythimidine (dT). In another embodiment, the nucleotide at the 3′-end of the antisense strand is deoxythimidine (dT). In one embodiment, there is a short sequence of deoxy-thymine nucleotides, for example, two dT nucleotides on the 3′-end of the sense or antisense strand.

[0302] In one embodiment, the sense strand sequence may be represented by formula (I):

(I)
5′ nₚ-Nₐ-(X X X)ᵢ-N_{b}-Y Y Y-N_{b}-(Z Z Z)ⱼ-Nₐ-n_{q} 3′

[0303] wherein:
[0304] i and j are each independently 0 or 1;
[0305] p and q are each independently 0-6;
[0306] each Nₐ independently represents an oligonucleotide sequence comprising 0-25 modified nucleotides, each sequence comprising at least two differently modified nucleotides;
[0307] each N_{b} independently represents an oligonucleotide sequence comprising 0-10 modified nucleotides;
[0308] each nₚ and n_{q} independently represent an overhang nucleotide;
[0309] wherein Nb and Y do not have the same modification; and
[0310] XXX, YYY and ZZZ each independently represent one motif of three identical modifications on three consecutive nucleotides. Preferably YYY is all 2′-F modified nucleotides.

[0311] In one embodiment, the Nₐ or N_{b} comprise modifications of alternating pattern.

[0312] In one embodiment, the YYY motif occurs at or near the cleavage site of the sense strand. For example, when the RNAi agent has a duplex region of 17-23 nucleotides in length, the YYY motif can occur at or the vicinity of the cleavage site (e.g.: can occur at positions 6, 7, 8, 7, 8, 9, 8, 9, 10, 9, 10, 11, 10, 11,12 or 11, 12, 13) of the sense strand, the count starting from the 1st nucleotide, from the 5′-end; or optionally, the count starting at the 1^{st} paired nucleotide within the duplex region, from the 5′- end.

[0313] In one embodiment, i is 1 and j is 0, or i is 0 and j is 1, or both i and j are 1. The sense strand can therefore be represented by the following formulas:

(Ib)
5′ nₚ-Nₐ-YYY-N_{b}-ZZZ-Nₐ-n_{q} 3′;
(Ic)
5′ nₚ-Nₐ-XXX-N_{b}-YYY-Nₐ-n_{q} 3′;
or
(Id)
5′ nₚ-Nₐ-XXX-N_{b}-YYY-N_{b}-ZZZ-Nₐ-n_{q} 3′.

[0314] When the sense strand is represented by formula (Ib), N_{b} represents an oligonucleotide sequence comprising 0-10, 0-7, 0-5, 0-4, 0-2 or 0 modified nucleotides.

[0315] Each Nₐ independently can represent an oligonucleotide sequence comprising 2-20, 2-15, or 2-10 modified nucleotides.

[0316] When the sense strand is represented as formula (Ic), N_{b} represents an oligonucleotide sequence comprising 0-10, 0-7, 0-10, 0-7, 0-5, 0-4, 0-2 or 0 modified nucleotides. Each Nₐ can independently represent an oligonucleotide sequence comprising 2-20, 2-15, or 2-10 modified nucleotides.

[0317] When the sense strand is represented as formula (Id), each N_{b} independently represents an oligonucleotide sequence comprising 0-10, 0-7, 0-5, 0-4, 0-2 or 0 modified nucleotides. Preferably, N_{b} is 0, 1, 2, 3, 4, 5 or 6. Each Nₐ can independently represent an oligonucleotide sequence comprising 2-20, 2-15, or 2-10 modified nucleotides.

[0318] Each of X, Y and Z may be the same or different from each other.

[0319] In other embodiments, i is 0 and j is 0, and the sense strand may be represented by the formula:

(Ia)
5′ nₚ-Nₐ-YYY-Nₐ-n_{q} 3′.

[0320] When the sense strand is represented by formula (Ia), each Nₐ independently can represent an oligonucleotide sequence comprising 2-20, 2-15, or 2-10 modified nucleotides.

[0321] In one embodiment, the antisense strand sequence of the RNAi may be represented by formula (Ie):

(Ie)
5′ n_{q′}-Nₐ′-(Z′Z′Z′)ₖ-N_{b}′-Y′Y′Y′-N_{b}′-(X′X′X′)ₗ-N′ₐ-
nₚ′ 3′

[0322] wherein:
[0323] k and 1 are each independently 0 or 1;
[0324] p′ and q′ are each independently 0-6;
[0325] each Nₐ′ independently represents an oligonucleotide sequence comprising 0-25 modified nucleotides, each sequence comprising at least two differently modified nucleotides;
[0326] each N_{b}′ independently represents an oligonucleotide sequence comprising 0-10 modified nucleotides;
[0327] each nₚ′ and n_{q}′ independently represent an overhang nucleotide;
[0328] wherein N_{b}′ and Y′ do not have the same modification;
[0329] and X′X′X′, Y′Y′Y′ and Z′Z′Z′ each independently represent one motif of three identical modifications on three consecutive nucleotides.

[0330] In one embodiment, the Nₐ′ or N_{b}′ comprise modifications of alternating pattern.

[0331] The Y′Y′Y′ motif occurs at or near the cleavage site of the antisense strand. For example, when the RNAi agent has a duplex region of 17-23nucleotide in length, the Y′Y′Y′ motif can occur at positions 9, 10, 11; 10, 11, 12; 11, 12, 13; 12, 13, 14; or 13, 14, 15 of the antisense strand, with the count starting from the 1^{st} nucleotide, from the 5′-end; or optionally, the count starting at the 1^{st} paired nucleotide within the duplex region, from the 5′- end. Preferably, the Y′Y′Y′ motif occurs at positions 11, 12, 13.

[0332] In one embodiment, Y′Y′Y′ motif is all 2′-OMe modified nucleotides.

[0333] In one embodiment, k is 1 and 1 is 0, or k is 0 and 1 is 1, or both k and 1 are 1.

[0334] The antisense strand can therefore be represented by the following formulas:

(If)
5′ n_{q′}-Nₐ′-Z′Z′Z′-N_{b}′-Y′Y′Y′-Nₐ′-n_{p′} 3′;
(Ig)
5′ n_{q′}-Nₐ′-Y′Y′Y′-N_{b}′-X′X′X′-n_{p′} 3′;
or
(Ih)
5′ n_{q′}-Nₐ′-Z′Z′Z′-N_{b}′-Y′Y′Y′-N_{b}′-X′X′X′-Nₐ′-n_{p′} 3′.

[0335] When the antisense strand is represented by formula (If), N_{b} represents an oligonucleotide sequence comprising 0-10, 0-7, 0-10, 0-7, 0-5, 0-4, 0-2 or 0 modified nucleotides. Each Nₐ′ independently represents an oligonucleotide sequence comprising 2-20, 2-15, or 2-10 modified nucleotides.

[0336] When the antisense strand is represented as formula (Ig), N_{b}′ represents an oligonucleotide sequence comprising 0-10, 0-7, 0-10, 0-7, 0-5, 0-4, 0-2 or 0 modified nucleotides. Each Nₐ′ independently represents an oligonucleotide sequence comprising 2-20, 2-15, or 2-10 modified nucleotides.

[0337] When the antisense strand is represented as formula (Ih), each N_{b}′ independently represents an oligonucleotide sequence comprising 0-10, 0-7, 0-10, 0-7, 0-5, 0-4, 0-2 or 0 modified nucleotides. Each Nₐ′ independently represents an oligonucleotide sequence comprising 2-20, 2-15, or 2-10 modified nucleotides. Preferably, N_{b} is 0, 1, 2, 3, 4, 5 or 6.

[0338] In other embodiments, k is 0 and 1 is 0 and the antisense strand may be represented by the formula:

(Ia)
5′ n_{p′}-N_{a′}-Y′Y′Y′-N_{a′}-n_{q′} 3′.

[0339] When the antisense strand is represented as formula (Ie), each Nₐ′ independently represents an oligonucleotide sequence comprising 2-20, 2-15, or 2-10 modified nucleotides.

[0340] Each of X′, Y′ and Z′ may be the same or different from each other.

[0341] Each nucleotide of the sense strand and antisense strand may be independently modified with LNA, UNA, CeNA, 2′-methoxyethyl, 2′-O-methyl, 2′-O-allyl, 2′-C— allyl, 2′-hydroxyl, or 2′-fluoro. For example, each nucleotide of the sense strand and antisense strand is independently modified with 2′-O-methyl or 2′-fluoro. Each X, Y, Z, X′, Y′ and Z′, in particular, may represent a 2′-O-methyl modification or a 2′-fluoro modification.

[0342] In one embodiment, the sense strand of the RNAi agent may contain YYY motif occurring at 9, 10 and 11 positions of the strand when the duplex region is 21 nt, the count starting from the 1^{st} nucleotide from the 5′-end, or optionally, the count starting at the 1st paired nucleotide within the duplex region, from the 5′-end; and Y represents 2′-F modification. The sense strand may additionally contain XXX motif or ZZZ motifs as wing modifications at the opposite end of the duplex region; and XXX and ZZZ each independently represents a 2′-OMe modification or 2′-F modification.

[0343] In one embodiment the antisense strand may contain Y′Y′Y′ motif occurring at positions 11, 12, 13 of the strand, the count starting from the 1^{st} nucleotide from the 5′-end, or optionally, the count starting at the 1^{st} paired nucleotide within the duplex region, from the 5′- end; and Y′ represents 2′-O-methyl modification. The antisense strand may additionally contain X′X′X′ motif or Z′Z′Z′ motifs as wing modifications at the opposite end of the duplex region; and X′X′X′ and Z′Z′Z′ each independently represents a 2′-OMe modification or 2′-F modification.

[0344] The sense strand represented by any one of the above formulas (Ia), (Ib), (Ic), and (Id) forms a duplex with a antisense strand being represented by any one of formulas (Ie), (If), (Ig), and (Ih), respectively.

[0345] Accordingly, the RNAi agents for use in the methods of the disclosure may comprise a sense strand and an antisense strand, each strand having 14 to 30 nucleotides, the RNAi duplex represented by formula (Ii):

(Ii)
sense:
5′ nₚ-Nₐ-(X X X)ᵢ-N_{b}-Y Y Y-N_{b}-(Z Z Z)ⱼ-Nₐ-n_{q} 3′
antisense:
3′ nₚ^{′}-Nₐ^{′}-(X′X′X′)ₖ-N_{b}^{′}-Y′Y′Y′-N_{b}^{′}-(Z′Z′Z′)ₗ-Nₐ^{′}-
n_{q}^{′} 5′

[0346] wherein:
[0347] i, j, k, and 1 are each independently 0 or 1;
[0348] p, p′, q, and q′ are each independently 0-6;
[0349] each Nₐ and Nₐ′ independently represents an oligonucleotide sequence comprising 0-25 modified nucleotides, each sequence comprising at least two differently modified nucleotides;
[0350] each N_{b} and N_{b}′ independently represents an oligonucleotide sequence comprising 0-10 modified nucleotides;
[0351] wherein
[0352] each nₚ′, nₚ, n_{q}′, and n_{q}, each of which may or may not be present, independently represents an overhang nucleotide; and
[0353] XXX, YYY, ZZZ, X′X′X′, Y′Y′Y′, and Z′Z′Z′ each independently represent one motif of three identical modifications on three consecutive nucleotides.

[0354] In one embodiment, i is 0 and j is 0; or i is 1 and j is 0; or i is 0 and j is 1; or both i and j are 0; or both i and j are 1. In another embodiment, k is 0 and 1 is 0; or k is 1 and μl is 0; k is 0 and 1 is 1; or both k and 1 are 0; or both k and 1 are 1.

[0355] Exemplary combinations of the sense strand and antisense strand forming an RNAi duplex include the formulas below:

(Ij)
5′ nₚ-Nₐ-Y Y Y-Nₐ-n_{q} 3′
3′ nₚ^{′}-Nₐ^{′}-Y′Y′Y′-Nₐ^{′}n_{q}^{′} 5′
(Ik)
5′ nₚ-Nₐ-Y Y Y-N_{b}-Z Z Z-Nₐ-n_{q} 3′
3′ nₚ^{′}-Nₐ^{′}-Y′Y′Y′-N_{b}^{′}-Z′Z′Z′-Nₐ^{′}n_{q}^{′} 5′
(Il)
5′ nₚ-Nₐ-X X X-N_{b}-Y Y Y-Nₐ-n_{q} 3′
3′ nₚ^{′}-Nₐ^{′}-X′X′X′-N_{b}^{′}-Y′Y′Y′-Nₐ^{′}-n_{q}^{′} 5′
(Im)
5′ nₚ-Nₐ-X X X-N_{b}-Y Y Y-N_{b}-Z Z Z-Nₐ-n_{q} 3′
3′ nₚ^{′}-Nₐ^{′}-X′X′X′-N_{b}^{′}-Y′Y′Y′-N_{b}^{′}-Z′Z′Z′-Nₐ-n_{q}^{′} 5′

[0356] When the RNAi agent is represented by formula (Ij), each Nₐ independently represents an oligonucleotide sequence comprising 2-20, 2-15, or 2-10 modified nucleotides.

[0357] When the RNAi agent is represented by formula (Ik), each N_{b} independently represents an oligonucleotide sequence comprising 1-10, 1-7, 1-5 or 1-4 modified nucleotides. Each Nₐ independently represents an oligonucleotide sequence comprising 2-20, 2-15, or 2-10 modified nucleotides.

[0358] When the RNAi agent is represented as formula (Il), each N_{b}, N_{b}′ independently represents an oligonucleotide sequence comprising 0-10, 0-7, 0-10, 0-7, 0-5, 0-4, 0-2 or 0 modified nucleotides. Each Nₐ independently represents an oligonucleotide sequence comprising 2-20, 2-15, or 2-10 modified nucleotides.

[0359] When the RNAi agent is represented as formula (Im), each N_{b}, N_{b}′ independently represents an oligonucleotide sequence comprising 0-10, 0-7, 0-10, 0-7, 0-5, 0-4, 0-2 or 0 modified nucleotides. Each Nₐ, Nₐ′ independently represents an oligonucleotide sequence comprising 2-20, 2-15, or 2-10 modified nucleotides. Each of Nₐ, Nₐ′, N_{b} and N_{b}′ independently comprises modifications of alternating pattern.

[0360] In one embodiment, when the RNAi agent is represented by formula (Im), the Nₐ modifications are 2′-O-methyl or 2′-fluoro modifications. In another embodiment, when the RNAi agent is represented by formula (Im), the Nₐ modifications are 2′-O-methyl or 2′-fluoro modifications and nₚ′>0 and at least one nₚ′ is linked to a neighboring nucleotide a via phosphorothioate linkage. In yet another embodiment, when the RNAi agent is represented by formula (Im), the Nₐ modifications are 2′-O-methyl or 2′-fluoro modifications nₚ′>0 and at least one nₚ′ is linked to a neighboring nucleotide via phosphorothioate linkage, and the sense strand is conjugated to one or more C16 (or related) moieties attached through a bivalent or trivalent branched linker (described below). In another embodiment, when the RNAi agent is represented by formula (IIIm), the Nₐ modifications are 2′-O-methyl or 2′-fluoro modifications, nₚ′>0 and at least one nₚ′ is linked to a neighboring nucleotide via phosphorothioate linkage, the sense strand comprises at least one phosphorothioate linkage, and the sense strand is conjugated to one or more lipophilic, e.g., C16 (or related) moieties, optionally attached through a bivalent or trivalent branched linker.

[0361] In one embodiment, when the RNAi agent is represented by formula (Ij), the Nₐ modifications are 2′-O-methyl or 2′-fluoro modifications, nₚ′>0 and at least one nₚ′ is linked to a neighboring nucleotide via phosphorothioate linkage, the sense strand comprises at least one phosphorothioate linkage, and the sense strand is conjugated to one or more lipophilic, e.g., C16 (or related) moieties attached through a bivalent or trivalent branched linker.

[0362] In one embodiment, the RNAi agent is a multimer containing at least two duplexes represented by formula (Ii), (Ij), (Ik), (Il), and (Im), wherein the duplexes are connected by a linker. The linker can be cleavable or non-cleavable. Optionally, the multimer further comprises a ligand. Each of the duplexes can target the same gene or two different genes; or each of the duplexes can target same gene at two different target sites.

[0363] In one embodiment, the RNAi agent is a multimer containing three, four, five, six or more duplexes represented by formula (Ii), (Ij), (Ik), (Il), and (Im), wherein the duplexes are connected by a linker. The linker can be cleavable or non-cleavable. Optionally, the multimer further comprises a ligand. Each of the duplexes can target the same gene or two different genes; or each of the duplexes can target same gene at two different target sites.

[0364] In one embodiment, two RNAi agents represented by formula (Ii), (Ij), (Ik), (Il), and (Im) are linked to each other at the 5′ end, and one or both of the 3′ ends and are optionally conjugated to a ligand. Each of the agents can target the same gene or two different genes; or each of the agents can target same gene at two different target sites.

[0365] Various publications describe multimeric RNAi agents that can be used in the methods of the disclosure. Such publications include WO2007/091269, WO2010/141511, WO2007/117686, WO2009/014887, and WO2011/031520; and U.S. Pat. No. 7,858,769, the entire contents of each of which are hereby incorporated herein by reference.

[0366] In certain embodiments, the compositions and methods of the disclosure include a vinyl phosphonate (VP) modification of an RNAi agent as described herein. In exemplary embodiments, a vinyl phosphonate of the disclosure has the following structure:

[chemical structure]

A vinyl phosphonate of the instant disclosure may be attached to either the antisense or the sense strand of a dsRNA of the disclosure. In certain embodiments, a vinyl phosphonate of the instant disclosure is attached to the antisense strand of a dsRNA, optionally at the 5′ end of the antisense strand of the dsRNA. The dsRNA agent can comprise a phosphorus-containing group at the 5′-end of the sense strand or antisense strand. The 5′-end phosphorus-containing group can be 5′-end phosphate (5′-P), 5′-end phosphorothioate (5′-PS), 5′-end phosphorodithioate (5′-PS2), 5′-end vinylphosphonate (5′-VP), 5′-end methylphosphonate (MePhos), or 5′-deoxy-5′-C-malonyl. When the 5′-end phosphorus-containing group is 5′-end vinylphosphonate (5′-VP), the 5′-VP can be either 5′-E-VP isomer (i.e., trans-vinylphosphonate,

[chemical structure]

5′-Z—VP isomer (i.e., cis-vinylphosphonate

[chemical structure]

or mixtures thereof.

[0367] For example, when the phosphate mimic is a 5′-E-vinyl phosphonate (VP), the 5′-terminal nucleotide can have the following structure,

[chemical structure]

[0368] wherein * indicates the location of the bond to 5′-position of the adjacent nucleotide;
[0369] R is hydrogen, hydroxy, methoxy, or fluoro (e.g., methoxy), or another modification described herein; and
[0370] B is a nucleobase or a modified nucleobase, optionally where B is adenine, guanine, cytosine, thymine or uracil (e.g., uracil or adenine).

[0371] Vinyl phosphate modifications are also contemplated for the compositions and methods of the instant disclosure. An exemplary vinyl phosphate structure is:

[chemical structure]

i. Thermally Destabilizing Modifications

[0372] In certain embodiments, a dsRNA molecule can be optimized for RNA interference by incorporating thermally destabilizing modifications in the seed region of the antisense strand. As used herein “seed region” means at positions 2-9 of the 5′-end of the referenced strand. For example, thermally destabilizing modifications can be incorporated in the seed region of the antisense strand to reduce or inhibit off-target gene silencing.

[0373] The term “thermally destabilizing modification(s)” includes modification(s) that would result with a dsRNA with a lower overall melting temperature (Tm) than the Tm of the dsRNA without having such modification(s). For example, the thermally destabilizing modification(s) can decrease the Tm of the dsRNA by 1-4° C., such as one, two, three or four degrees Celcius. And, the term “thermally destabilizing nucleotide” refers to a nucleotide containing one or more thermally destabilizing modifications.

[0374] It has been discovered that dsRNAs with an antisense strand comprising at least one thermally destabilizing modification of the duplex within the first 9 nucleotide positions, counting from the 5′ end, of the antisense strand have reduced off-target gene silencing activity. Accordingly, in some embodiments, the antisense strand comprises at least one (e.g., one, two, three, four, five or more) thermally destabilizing modification of the duplex within the first 9 nucleotide positions of the 5′ region of the antisense strand. In some embodiments, one or more thermally destabilizing modification(s) of the duplex is/are located in positions 2-9, such as positions 4-8, from the 5′-end of the antisense strand. In some further embodiments, the thermally destabilizing modification(s) of the duplex is/are located at position 6, 7 or 8 from the 5′-end of the antisense strand. In still some further embodiments, the thermally destabilizing modification of the duplex is located at position 7 from the 5′-end of the antisense strand. In some embodiments, the thermally destabilizing modification of the duplex is located at position 2, 3, 4, 5 or 9 from the 5′-end of the antisense strand.

[0375] The thermally destabilizing modifications can include, but are not limited to, abasic modification; mismatch with the opposing nucleotide in the opposing strand; and sugar modification such as 2′-deoxy modification or acyclic nucleotide, e.g., unlocked nucleic acids (UNA) or glycol nucleic acid (GNA).

[0376] Exemplified abasic modifications include, but are not limited to the following:

[chemical structure]

### Wherein R═H, Me, Et or OMe; R′═H: Me, Et or OMe; R″═H, Me: Et or OMe

[chemical structure]

wherein B is a modified or unmodified nucleobase.

[0378] Exemplified sugar modifications include, but are not limited to the following:

[chemical structure]

wherein B is a modified or unmodified nucleobase.

[0379] In some embodiments the thermally destabilizing modification of the duplex is selected from the group consisting of:

[chemical structure]

wherein B is a modified or unmodified nucleobase and the asterisk on each structure represents either R, S or racemic.

[0380] The term “acyclic nucleotide” refers to any nucleotide having an acyclic ribose sugar, for example, where any of bonds between the ribose carbons (e.g., C1′—C2′, C2′—C3′, C3′—C4′, C4′-04′, or C1′-04′) is absent or at least one of ribose carbons or oxygen (e.g., C1′, C2′, C3′, C4′ or 04′) are independently or in combination absent from the nucleotide. In some embodiments, acyclic nucleotide is

[chemical structure]

wherein B is a modified or unmodified nucleobase, R¹ and R² independently are H, halogen, OR₃, or alkyl; and R₃ is H, alkyl, cycloalkyl, aryl, aralkyl, heteroaryl or sugar). The acyclic derivative provides greater backbone flexibility without affecting the Watson-Crick pairings. The acyclic nucleotide can be linked via 2′-5′ or 3′-5′ linkage.

[0381] The term ‘GNA’ refers to glycol nucleic acid which is a polymer similar to DNA or RNA but differing in the composition of its “backbone” in that is composed of repeating glycerol units linked by phosphodiester bonds:

[chemical structure]

[0382] The thermally destabilizing modification of the duplex can be mismatches (i.e., noncomplementary base pairs) between the thermally destabilizing nucleotide and the opposing nucleotide in the opposite strand within the dsRNA duplex. Exemplary mismatch base pairs include G:G, G:A, G:U, G:T, A:A, A:C, C:C, C:U, C:T, U:U, T:T, U:T, or a combination thereof. Other mismatch base pairings known in the art are also amenable to the present invention. A mismatch can occur between nucleotides that are either naturally occurring nucleotides or modified nucleotides, i.e., the mismatch base pairing can occur between the nucleobases from respective nucleotides independent of the modifications on the ribose sugars of the nucleotides. In certain embodiments, the dsRNA molecule contains at least one nucleobase in the mismatch pairing that is a 2′-deoxy nucleobase; e.g., the 2′-deoxy nucleobase is in the sense strand.

In some embodiments, the thermally destabilizing modification of the duplex in the seed region of the antisense strand includes nucleotides with impaired Watson-Crick hydrogen-bonding to complementary base on the target mRNA, such as:

[chemical structure]

[chemical structure]

[0383] More examples of abasic nucleotide, acyclic nucleotide modifications (including UNA and GNA), and mismatch modifications have been described in detail in WO 2011/133876, which is herein incorporated by reference in its entirety. The thermally destabilizing modifications may also include universal base with reduced or abolished capability to form hydrogen bonds with the opposing bases, and phosphate modifications.

[0384] In some embodiments, the thermally destabilizing modification of the duplex includes nucleotides with non-canonical bases such as, but not limited to, nucleobase modifications with impaired or completely abolished capability to form hydrogen bonds with bases in the opposite strand. These nucleobase modifications have been evaluated for destabilization of the central region of the dsRNA duplex as described in WO 2010/0011895, which is herein incorporated by reference in its entirety. Exemplary nucleobase modifications are:

[chemical structure]

[0385] In some embodiments, the thermally destabilizing modification of the duplex in the seed region of the antisense strand includes one or more α-nucleotide complementary to the base on the target mRNA, such as:

[chemical structure]

wherein R is H, OH, OCH₃, F, NH₂, NHMe, NMe₂ or O-alkyl.

[0386] Exemplary phosphate modifications known to decrease the thermal stability of dsRNA duplexes compared to natural phosphodiester linkages are:

[chemical structure]

[0387] The alkyl for the R group can be a C₁Calkyl. Specific alkyls for the R group include, but are not limited to methyl, ethyl, propyl, isopropyl, butyl, pentyl and hexyl.

[0388] As the skilled artisan recognizes, in view of the functional role of nucleobases is defining specificity of an RNAi agent of the disclosure, while nucleobase modifications can be performed in the various manners as described herein, e.g., to introduce destabilizing modifications into an RNAi agent of the disclosure, e.g., for purpose of enhancing on-target effect relative to off-target effect, the range of modifications available and, in general, present upon RNAi agents of the disclosure tends to be much greater for non-nucleobase modifications, e.g., modifications to sugar groups or phosphate backbones of polyribonucleotides. Such modifications are described in greater detail in other sections of the instant disclosure and are expressly contemplated for RNAi agents of the disclosure, either possessing native nucleobases or modified nucleobases as described above or elsewhere herein.

[0389] In addition to the antisense strand comprising a thermally destabilizing modification, the dsRNA can also comprise one or more stabilizing modifications. For example, the dsRNA can comprise at least two (e.g., two, three, four, five, six, seven, eight, nine, ten or more) stabilizing modifications. Without limitations, the stabilizing modifications all can be present in one strand. In some embodiments, both the sense and the antisense strands comprise at least two stabilizing modifications. The stabilizing modification can occur on any nucleotide of the sense strand or antisense strand. For instance, the stabilizing modification can occur on every nucleotide on the sense strand or antisense strand; each stabilizing modification can occur in an alternating pattern on the sense strand or antisense strand; or the sense strand or antisense strand comprises both stabilizing modification in an alternating pattern. The alternating pattern of the stabilizing modifications on the sense strand may be the same or different from the antisense strand, and the alternating pattern of the stabilizing modifications on the sense strand can have a shift relative to the alternating pattern of the stabilizing modifications on the antisense strand.

[0390] In some embodiments, the antisense strand comprises at least two (e.g., two, three, four, five, six, seven, eight, nine, ten or more) stabilizing modifications. Without limitations, a stabilizing modification in the antisense strand can be present at any positions. In some embodiments, the antisense comprises stabilizing modifications at positions 2, 6, 8, 9, 14, and 16 from the 5′-end. In some other embodiments, the antisense comprises stabilizing modifications at positions 2, 6, 14, and 16 from the 5′-end. In still some other embodiments, the antisense comprises stabilizing modifications at positions 2, 14, and 16 from the 5′-end.

[0391] In some embodiments, the antisense strand comprises at least one stabilizing modification adjacent to the destabilizing modification. For example, the stabilizing modification can be the nucleotide at the 5′-end or the 3′-end of the destabilizing modification, i.e., at position −1 or +1 from the position of the destabilizing modification. In some embodiments, the antisense strand comprises a stabilizing modification at each of the 5′-end and the 3′-end of the destabilizing modification, i.e., positions −1 and +1 from the position of the destabilizing modification.

[0392] In some embodiments, the antisense strand comprises at least two stabilizing modifications at the 3′-end of the destabilizing modification, i.e., at positions+1 and +2 from the position of the destabilizing modification.

[0393] In some embodiments, the sense strand comprises at least two (e.g., two, three, four, five, six, seven, eight, nine, ten or more) stabilizing modifications. Without limitations, a stabilizing modification in the sense strand can be present at any positions. In some embodiments, the sense strand comprises stabilizing modifications at positions 7, 10, and 11 from the 5′-end. In some other embodiments, the sense strand comprises stabilizing modifications at positions 7, 9, 10, and 11 from the 5′-end. In some embodiments, the sense strand comprises stabilizing modifications at positions opposite or complementary to positions 11, 12, and 15 of the antisense strand, counting from the 5′-end of the antisense strand. In some other embodiments, the sense strand comprises stabilizing modifications at positions opposite or complementary to positions 11, 12, 13, and 15 of the antisense strand, counting from the 5′-end of the antisense strand. In some embodiments, the sense strand comprises a block of two, three, or four stabilizing modifications.

[0394] In some embodiments, the sense strand does not comprise a stabilizing modification in position opposite or complementary to the thermally destabilizing modification of the duplex in the antisense strand.

[0395] Exemplary thermally stabilizing modifications include, but are not limited to, 2′-fluoro modifications. Other thermally stabilizing modifications include, but are not limited to, LNA.

[0396] In some embodiments, the dsRNA of the disclosure comprises at least four (e.g., four, five, six, seven, eight, nine, ten, or more) 2′-fluoro nucleotides. Without limitations, the 2′-fluoro nucleotides all can be present in one strand. In some embodiments, both the sense and the antisense strands comprise at least two 2′-fluoro nucleotides. The 2′-fluoro modification can occur on any nucleotide of the sense strand or antisense strand. For instance, the 2′-fluoro modification can occur on every nucleotide on the sense strand or antisense strand; each 2′-fluoro modification can occur in an alternating pattern on the sense strand or antisense strand; or the sense strand or antisense strand comprises both 2′-fluoro modifications in an alternating pattern. The alternating pattern of the 2′-fluoro modifications on the sense strand may be the same or different from the antisense strand, and the alternating pattern of the 2′-fluoro modifications on the sense strand can have a shift relative to the alternating pattern of the 2′-fluoro modifications on the antisense strand.

[0397] In some embodiments, the antisense strand comprises at least two (e.g., two, three, four, five, six, seven, eight, nine, ten, or more) 2′-fluoro nucleotides. Without limitations, a 2′-fluoro modification in the antisense strand can be present at any positions. In some embodiments, the antisense comprises 2′-fluoro nucleotides at positions 2, 6, 8, 9, 14, and 16 from the 5′-end. In some other embodiments, the antisense comprises 2′-fluoro nucleotides at positions 2, 6, 14, and 16 from the 5′-end. In still some other embodiments, the antisense comprises 2′-fluoro nucleotides at positions 2, 14, and 16 from the 5′-end.

[0398] In some embodiments, the antisense strand comprises at least one 2′-fluoro nucleotide adjacent to the destabilizing modification. For example, the 2′-fluoro nucleotide can be the nucleotide at the 5′-end or the 3′-end of the destabilizing modification, i.e., at position −1 or +1 from the position of the destabilizing modification. In some embodiments, the antisense strand comprises a 2′-fluoro nucleotide at each of the 5′-end and the 3′-end of the destabilizing modification, i.e., positions −1 and +1 from the position of the destabilizing modification.

[0399] In some embodiments, the antisense strand comprises at least two 2′-fluoro nucleotides at the 3′-end of the destabilizing modification, i.e., at positions+1 and +2 from the position of the destabilizing modification.

[0400] In some embodiments, the sense strand comprises at least two (e.g., two, three, four, five, six, seven, eight, nine, ten or more) 2′-fluoro nucleotides. Without limitations, a 2′-fluoro modification in the sense strand can be present at any positions. In some embodiments, the antisense comprises 2′-fluoro nucleotides at positions 7, 10, and 11 from the 5′-end. In some other embodiments, the sense strand comprises 2′-fluoro nucleotides at positions 7, 9, 10, and 11 from the 5′-end. In some embodiments, the sense strand comprises 2′-fluoro nucleotides at positions opposite or complementary to positions 11, 12, and 15 of the antisense strand, counting from the 5′-end of the antisense strand. In some other embodiments, the sense strand comprises 2′-fluoro nucleotides at positions opposite or complementary to positions 11, 12, 13, and 15 of the antisense strand, counting from the 5′-end of the antisense strand. In some embodiments, the sense strand comprises a block of two, three or four 2′-fluoro nucleotides.

[0401] In some embodiments, the sense strand does not comprise a 2′-fluoro nucleotide in position opposite or complementary to the thermally destabilizing modification of the duplex in the antisense strand.

[0402] In some embodiments, the dsRNA molecule of the disclosure comprises a 21 nucleotides (nt) sense strand and a 23 nucleotides (nt) antisense, wherein the antisense strand contains at least one thermally destabilizing nucleotide, where the at least one thermally destabilizing nucleotide occurs in the seed region of the antisense strand (i.e., at position 2-9 of the 5′-end of the antisense strand), wherein one end of the dsRNA is blunt, while the other end is comprises a 2 nt overhang, and wherein the dsRNA optionally further has at least one (e.g., one, two, three, four, five, six or all seven) of the following characteristics: (i) the antisense comprises 2, 3, 4, 5 or 6 2′-fluoro modifications; (ii) the antisense comprises 1, 2, 3, 4 or 5 phosphorothioate internucleotide linkages; (iii) the sense strand is conjugated with a ligand; (iv) the sense strand comprises 2, 3, 4 or 5 2′-fluoro modifications; (v) the sense strand comprises 1, 2, 3, 4 or 5 phosphorothioate internucleotide linkages; (vi) the dsRNA comprises at least four 2′-fluoro modifications; and (vii) the dsRNA comprises a blunt end at 5′-end of the antisense strand. Preferably, the 2 nt overhang is at the 3′-end of the antisense.

[0403] In some embodiments, the dsRNA molecule of the disclosure comprising a sense and antisense strands, wherein: the sense strand is 25-30 nucleotide residues in length, wherein starting from the 5′ terminal nucleotide (position 1), positions 1 to 23 of said sense strand comprise at least 8 ribonucleotides; antisense strand is 36-66 nucleotide residues in length and, starting from the 3′ terminal nucleotide, at least 8 ribonucleotides in the positions paired with positions 1-23 of sense strand to form a duplex; wherein at least the 3′terminal nucleotide of antisense strand is unpaired with sense strand, and up to 6 consecutive 3′ terminal nucleotides are unpaired with sense strand, thereby forming a 3′ single stranded overhang of 1-6 nucleotides; wherein the 5′ terminus of antisense strand comprises from 10-30 consecutive nucleotides which are unpaired with sense strand, thereby forming a 10-30 nucleotide single stranded 5′ overhang; wherein at least the sense strand 5′ terminal and 3′ terminal nucleotides are base paired with nucleotides of antisense strand when sense and antisense strands are aligned for maximum complementarity, thereby forming a substantially duplexed region between sense and antisense strands; and antisense strand is sufficiently complementary to a target RNA along at least 19 ribonucleotides of antisense strand length to reduce target gene expression when said double stranded nucleic acid is introduced into a mammalian cell; and wherein the antisense strand contains at least one thermally destabilizing nucleotide, where at least one thermally destabilizing nucleotide is in the seed region of the antisense strand (i.e. at position 2-9 of the 5′-end of the antisense strand). For example, the thermally destabilizing nucleotide occurs between positions opposite or complementary to positions 14-17 of the 5′-end of the sense strand, and wherein the dsRNA optionally further has at least one (e.g., one, two, three, four, five, six or all seven) of the following characteristics: (i) the antisense comprises 2, 3, 4, 5, or 6 2′-fluoro modifications; (ii) the antisense comprises 1, 2, 3, 4, or 5 phosphorothioate internucleotide linkages; (iii) the sense strand is conjugated with a ligand; (iv) the sense strand comprises 2, 3, 4, or 5 2′-fluoro modifications; (v) the sense strand comprises 1, 2, 3, 4, or 5 phosphorothioate internucleotide linkages; and (vi) the dsRNA comprises at least four 2′-fluoro modifications; and (vii) the dsRNA comprises a duplex region of 12-30 nucleotide pairs in length.

[0404] In some embodiments, the dsRNA molecule of the disclosure comprises a sense and antisense strands, wherein said dsRNA molecule comprises a sense strand having a length which is at least 25 and at most 29 nucleotides and an antisense strand having a length which is at most 30 nucleotides with the sense strand comprises a modified nucleotide that is susceptible to enzymatic degradation at position 11 from the 5′end, wherein the 3′ end of said sense strand and the 5′ end of said antisense strand form a blunt end and said antisense strand is 1-4 nucleotides longer at its 3′ end than the sense strand, wherein the duplex region which is at least 25 nucleotides in length, and said antisense strand is sufficiently complementary to a target mRNA along at least 19 nt of said antisense strand length to reduce target gene expression when said dsRNA molecule is introduced into a mammalian cell, and wherein dicer cleavage of said dsRNA preferentially results in an siRNA comprising said 3′ end of said antisense strand, thereby reducing expression of the target gene in the mammal, wherein the antisense strand contains at least one thermally destabilizing nucleotide, where the at least one thermally destabilizing nucleotide is in the seed region of the antisense strand (i.e. at position 2-9 of the 5′-end of the antisense strand), and wherein the dsRNA optionally further has at least one (e.g., one, two, three, four, five, six or all seven) of the following characteristics: (i) the antisense comprises 2, 3, 4, 5, or 6 2′-fluoro modifications; (ii) the antisense comprises 1, 2, 3, 4, or 5 phosphorothioate internucleotide linkages; (iii) the sense strand is conjugated with a ligand; (iv) the sense strand comprises 2, 3, 4, or 5 2′-fluoro modifications; (v) the sense strand comprises 1, 2, 3, 4, or 5 phosphorothioate internucleotide linkages; and (vi) the dsRNA comprises at least four 2′-fluoro modifications; and (vii) the dsRNA has a duplex region of 12-29 nucleotide pairs in length.

[0405] In some embodiments, every nucleotide in the sense strand and antisense strand of the dsRNA molecule may be modified. Each nucleotide may be modified with the same or different modification which can include one or more alteration of one or both of the non-linking phosphate oxygens or of one or more of the linking phosphate oxygens; alteration of a constituent of the ribose sugar, e.g., of the 2′ hydroxyl on the ribose sugar; wholesale replacement of the phosphate moiety with “dephospho” linkers; modification or replacement of a naturally occurring base; and replacement or modification of the ribose-phosphate backbone.

[0406] As nucleic acids are polymers of subunits, many of the modifications occur at a position which is repeated within a nucleic acid, e.g., a modification of a base, or a phosphate moiety, or a non-linking O of a phosphate moiety. In some cases, the modification occurs at all of the subject positions in the nucleic acid but in many cases it does not. By way of example, a modification may only occur at a 3′ or 5′ terminal position, may only occur in a terminal region, e.g., at a position on a terminal nucleotide or in the last 2, 3, 4, 5, or 10 nucleotides of a strand. A modification may occur in a double strand region, a single strand region, or in both. A modification may occur only in the double strand region of an RNA or may only occur in a single strand region of an RNA. E.g., a phosphorothioate modification at a non-linking O position may only occur at one or both termini, may only occur in a terminal region, e.g., at a position on a terminal nucleotide or in the last 2, 3, 4, 5, or 10 nucleotides of a strand, or may occur in double strand and single strand regions, particularly at termini. The 5′ end or ends can be phosphorylated.

[0407] It may be possible, e.g., to enhance stability, to include particular bases in overhangs, or to include modified nucleotides or nucleotide surrogates, in single strand overhangs, e.g., in a 5′ or 3′ overhang, or in both. E.g., it can be desirable to include purine nucleotides in overhangs. In some embodiments all or some of the bases in a 3′ or 5′ overhang may be modified, e.g., with a modification described herein. Modifications can include, e.g., the use of modifications at the 2′ position of the ribose sugar with modifications that are known in the art, e.g., the use of deoxyribonucleotides, 2′-deoxy-2′-fluoro (2′-F) or 2′-O-methyl modified instead of the ribosugar of the nucleobase, and modifications in the phosphate group, e.g., phosphorothioate modifications. Overhangs need not be homologous with the target sequence.

[0408] In some embodiments, each residue of the sense strand and antisense strand is independently modified with locked nucleic acid (LNA), unlocked nucleic acid (UNA), cyclohexene nucleic acid (CeNA), 2′-methoxyethyl, 2′- O-methyl, 2′-O-allyl, 2′-C— allyl, 2′-deoxy, or 2′-fluoro. The strands can contain more than one modification. In some embodiments, each residue of the sense strand and antisense strand is independently modified with 2′-O-methyl or 2′-fluoro. It is to be understood that these modifications are in addition to the at least one thermally destabilizing modification of the duplex present in the antisense strand.

[0409] At least two different modifications are typically present on the sense strand and antisense strand. Those two modifications may be the 2′-deoxy, 2′- O-methyl or 2′-fluoro modifications, acyclic nucleotides or others. In some embodiments, the sense strand and antisense strand each comprises two differently modified nucleotides selected from 2′-O-methyl or 2′-deoxy. In some embodiments, each residue of the sense strand and antisense strand is independently modified with 2′-O-methyl nucleotide, 2′-deoxy nucleotide, 2′-deoxy-2′-fluoro nucleotide, 2′-O—N-methylacetamido (2′-O-NMA) nucleotide, a 2′-O-dimethylaminoethoxyethyl(2′-O-DMAEOE) nucleotide, 2′-O-aminopropyl (2′-O-AP) nucleotide, or 2′-ara-F nucleotide. Again, it is to be understood that these modifications are in addition to the at least one thermally destabilizing modification of the duplex present in the antisense strand.

[0410] In some embodiments, the dsRNA molecule of the disclosure comprises modifications of an alternating pattern, particular in the B1, B2, B3, B1′, B2′, B3′, B4′ regions. The term “alternating motif” or “alternative pattern” as used herein refers to a motif having one or more modifications, each modification occurring on alternating nucleotides of one strand. The alternating nucleotide may refer to one per every other nucleotide or one per every three nucleotides, or a similar pattern. For example, if A, B and C each represent one type of modification to the nucleotide, the alternating motif can be “ABABABABABAB . . . ,” “AABBAABBAABB . . . ,” “AABAABAABAAB . . . ,” “AAABAAABAAAB . . . ,” “AAABBBAAABBB . . . ,” or “ABCABCABCABC . . . ,” etc.

[0411] The type of modifications contained in the alternating motif may be the same or different. For example, if A, B, C, D each represent one type of modification on the nucleotide, the alternating pattern, i.e., modifications on every other nucleotide, may be the same, but each of the sense strand or antisense strand can be selected from several possibilities of modifications within the alternating motif such as “ABABAB . . . ”, “ACACAC . . . ” “BDBDBD . . . ” or “CDCDCD . . . ,” etc.

[0412] In some embodiments, the dsRNA molecule of the disclosure comprises the modification pattern for the alternating motif on the sense strand relative to the modification pattern for the alternating motif on the antisense strand is shifted. The shift may be such that the modified group of nucleotides of the sense strand corresponds to a differently modified group of nucleotides of the antisense strand and vice versa. For example, the sense strand when paired with the antisense strand in the dsRNA duplex, the alternating motif in the sense strand may start with “ABABAB” from 5′-3′ of the strand and the alternating motif in the antisense strand may start with “BABABA” from 3′-5′ of the strand within the duplex region. As another example, the alternating motif in the sense strand may start with “AABBAABB” from 5′-3′ of the strand and the alternating motif in the antisense strand may start with “BBAABBAA” from 3′-5′ of the strand within the duplex region, so that there is a complete or partial shift of the modification patterns between the sense strand and the antisense strand.

[0413] The dsRNA molecule of the disclosure may further comprise at least one phosphorothioate or methylphosphonate internucleotide linkage. The phosphorothioate or methylphosphonate internucleotide linkage modification may occur on any nucleotide of the sense strand or antisense strand or both in any position of the strand. For instance, the internucleotide linkage modification may occur on every nucleotide on the sense strand or antisense strand; each internucleotide linkage modification may occur in an alternating pattern on the sense strand or antisense strand; or the sense strand or antisense strand comprises both internucleotide linkage modifications in an alternating pattern. The alternating pattern of the internucleotide linkage modification on the sense strand may be the same or different from the antisense strand, and the alternating pattern of the internucleotide linkage modification on the sense strand may have a shift relative to the alternating pattern of the internucleotide linkage modification on the antisense strand.

[0414] In some embodiments, the dsRNA molecule comprises the phosphorothioate or methylphosphonate internucleotide linkage modification in the overhang region. For example, the overhang region comprises two nucleotides having a phosphorothioate or methylphosphonate internucleotide linkage between the two nucleotides. Internucleotide linkage modifications also may be made to link the overhang nucleotides with the terminal paired nucleotides within duplex region. For example, at least 2, 3, 4, or all the overhang nucleotides may be linked through phosphorothioate or methylphosphonate internucleotide linkage, and optionally, there may be additional phosphorothioate or methylphosphonate internucleotide linkages linking the overhang nucleotide with a paired nucleotide that is next to the overhang nucleotide. For instance, there may be at least two phosphorothioate internucleotide linkages between the terminal three nucleotides, in which two of the three nucleotides are overhang nucleotides, and the third is a paired nucleotide next to the overhang nucleotide. Preferably, these terminal three nucleotides may be at the 3′-end of the antisense strand.

[0415] In some embodiments, the sense strand of the dsRNA molecule comprises 1-10 blocks of two to ten phosphorothioate or methylphosphonate internucleotide linkages separated by 1, 2, 3, 4, 5, 6, 7, 8, 9, 10, 11, 12, 13, 14, 15, or 16 phosphate internucleotide linkages, wherein one of the phosphorothioate or methylphosphonate internucleotide linkages is placed at any position in the oligonucleotide sequence and the said sense strand is paired with an antisense strand comprising any combination of phosphorothioate, methylphosphonate and phosphate internucleotide linkages or an antisense strand comprising either phosphorothioate or methylphosphonate or phosphate linkage.

[0416] In some embodiments, the antisense strand of the dsRNA molecule comprises two blocks of two phosphorothioate or methylphosphonate internucleotide linkages separated by 1, 2, 3, 4, 5, 6, 7, 8, 9, 10, 11, 12, 13, 14, 15, 16, 17, or 18 phosphate internucleotide linkages, wherein one of the phosphorothioate or methylphosphonate internucleotide linkages is placed at any position in the oligonucleotide sequence and the said antisense strand is paired with a sense strand comprising any combination of phosphorothioate, methylphosphonate and phosphate internucleotide linkages or an antisense strand comprising either phosphorothioate or methylphosphonate or phosphate linkage.

[0417] In some embodiments, the antisense strand of the dsRNA molecule comprises two blocks of three phosphorothioate or methylphosphonate internucleotide linkages separated by 1, 2, 3, 4, 5, 6, 7, 8, 9, 10, 11, 12, 13, 14, 15, or 16 phosphate internucleotide linkages, wherein one of the phosphorothioate or methylphosphonate internucleotide linkages is placed at any position in the oligonucleotide sequence and the said antisense strand is paired with a sense strand comprising any combination of phosphorothioate, methylphosphonate and phosphate internucleotide linkages or an antisense strand comprising either phosphorothioate or methylphosphonate or phosphate linkage.

[0418] In some embodiments, the antisense strand of the dsRNA molecule comprises two blocks of four phosphorothioate or methylphosphonate internucleotide linkages separated by 1, 2, 3, 4, 5, 6, 7, 8, 9, 10, 11, 12, 13, or 14 phosphate internucleotide linkages, wherein one of the phosphorothioate or methylphosphonate internucleotide linkages is placed at any position in the oligonucleotide sequence and the said antisense strand is paired with a sense strand comprising any combination of phosphorothioate, methylphosphonate and phosphate internucleotide linkages or an antisense strand comprising either phosphorothioate or methylphosphonate or phosphate linkage.

[0419] In some embodiments, the antisense strand of the dsRNA molecule comprises two blocks of five phosphorothioate or methylphosphonate internucleotide linkages separated by 1, 2, 3, 4, 5, 6, 7, 8, 9, 10, 11, or 12 phosphate internucleotide linkages, wherein one of the phosphorothioate or methylphosphonate internucleotide linkages is placed at any position in the oligonucleotide sequence and the said antisense strand is paired with a sense strand comprising any combination of phosphorothioate, methylphosphonate and phosphate internucleotide linkages or an antisense strand comprising either phosphorothioate or methylphosphonate or phosphate linkage.

[0420] In some embodiments, the antisense strand of the dsRNA molecule comprises two blocks of six phosphorothioate or methylphosphonate internucleotide linkages separated by 1, 2, 3, 4, 5, 6, 7, 8, 9, or 10 phosphate internucleotide linkages, wherein one of the phosphorothioate or methylphosphonate internucleotide linkages is placed at any position in the oligonucleotide sequence and the said antisense strand is paired with a sense strand comprising any combination of phosphorothioate, methylphosphonate and phosphate internucleotide linkages or an antisense strand comprising either phosphorothioate or methylphosphonate or phosphate linkage.

[0421] In some embodiments, the antisense strand of the dsRNA molecule comprises two blocks of seven phosphorothioate or methylphosphonate internucleotide linkages separated by 1, 2, 3, 4, 5, 6, 7, or 8 phosphate internucleotide linkages, wherein one of the phosphorothioate or methylphosphonate internucleotide linkages is placed at any position in the oligonucleotide sequence and the said antisense strand is paired with a sense strand comprising any combination of phosphorothioate, methylphosphonate and phosphate internucleotide linkages or an antisense strand comprising either phosphorothioate or methylphosphonate or phosphate linkage.

[0422] In some embodiments, the antisense strand of the dsRNA molecule comprises two blocks of eight phosphorothioate or methylphosphonate internucleotide linkages separated by 1, 2, 3, 4, 5, or 6 phosphate internucleotide linkages, wherein one of the phosphorothioate or methylphosphonate internucleotide linkages is placed at any position in the oligonucleotide sequence and the said antisense strand is paired with a sense strand comprising any combination of phosphorothioate, methylphosphonate and phosphate internucleotide linkages or an antisense strand comprising either phosphorothioate or methylphosphonate or phosphate linkage.

[0423] In some embodiments, the antisense strand of the dsRNA molecule comprises two blocks of nine phosphorothioate or methylphosphonate internucleotide linkages separated by 1, 2, 3, or 4 phosphate internucleotide linkages, wherein one of the phosphorothioate or methylphosphonate internucleotide linkages is placed at any position in the oligonucleotide sequence and the said antisense strand is paired with a sense strand comprising any combination of phosphorothioate, methylphosphonate and phosphate internucleotide linkages or an antisense strand comprising either phosphorothioate or methylphosphonate or phosphate linkage.

[0424] In some embodiments, the dsRNA molecule of the disclosure further comprises one or more phosphorothioate or methylphosphonate internucleotide linkage modification within 1-10 of the termini position(s) of the sense or antisense strand. For example, at least 2, 3, 4, 5, 6, 7, 8, 9, or 10 nucleotides may be linked through phosphorothioate or methylphosphonate internucleotide linkage at one end or both ends of the sense or antisense strand.

[0425] In some embodiments, the dsRNA molecule of the disclosure further comprises one or more phosphorothioate or methylphosphonate internucleotide linkage modification within 1-10 nucleotides of the internal region of the duplex of each of the sense or antisense strand. For example, at least 2, 3, 4, 5, 6, 7, 8, 9, or 10 nucleotides may be linked through phosphorothioate or methylphosphonate internucleotide linkage at positions 8-16 of the duplex region counting from the 5′-end of the sense strand; the dsRNA molecule can optionally further comprise one or more phosphorothioate or methylphosphonate internucleotide linkage modification within 1-10 nucleotides of the termini position(s).

[0426] In some embodiments, the dsRNA molecule of the disclosure further comprises one to five phosphorothioate or methylphosphonate internucleotide linkage modification(s) within position 1-5 and one to five phosphorothioate or methylphosphonate internucleotide linkage modification(s) within position 18-23 of the sense strand (counting from the 5′-end), and one to five phosphorothioate or methylphosphonate internucleotide linkage modifications at positions 1 and 2, and one to five within positions 18-23 of the antisense strand (counting from the 5′-end).

[0427] In some embodiments, the dsRNA molecule of the disclosure further comprises one phosphorothioate internucleotide linkage modification within positions 1-5 and one phosphorothioate or methylphosphonate internucleotide linkage modification within positions 18-23 of the sense strand (counting from the 5′-end), and one phosphorothioate internucleotide linkage modification at position 1 or 2, and two phosphorothioate or methylphosphonate internucleotide linkage modifications within positions 18-23 of the antisense strand (counting from the 5′-end).

[0428] In some embodiments, the dsRNA molecule of the disclosure further comprises two phosphorothioate internucleotide linkage modifications within position 1-5 and one phosphorothioate internucleotide linkage modification within positions 18-23 of the sense strand (counting from the 5′-end), and one phosphorothioate internucleotide linkage modification at position 1 or 2, and two phosphorothioate internucleotide linkage modifications within positions 18-23 of the antisense strand (counting from the 5′-end).

[0429] In some embodiments, the dsRNA molecule of the disclosure further comprises two phosphorothioate internucleotide linkage modifications within positions 1-5 and two phosphorothioate internucleotide linkage modifications within positions 18-23 of the sense strand (counting from the 5′-end), and one phosphorothioate internucleotide linkage modification at position 1 or 2, and two phosphorothioate internucleotide linkage modifications within positions 18-23 of the antisense strand (counting from the 5′-end).

[0430] In some embodiments, the dsRNA molecule of the disclosure further comprises two phosphorothioate internucleotide linkage modifications within positions 1-5 and two phosphorothioate internucleotide linkage modifications within positions 18-23 of the sense strand (counting from the 5′-end), and one phosphorothioate internucleotide linkage modification at position 1 or 2, and one phosphorothioate internucleotide linkage modification within positions 18-23 of the antisense strand (counting from the 5′-end).

[0431] In some embodiments, the dsRNA molecule of the disclosure further comprises one phosphorothioate internucleotide linkage modification within positions 1-5 and one phosphorothioate internucleotide linkage modification within positions 18-23 of the sense strand (counting from the 5′-end), and two phosphorothioate internucleotide linkage modifications at positions 1 and 2, and two phosphorothioate internucleotide linkage modifications within positions 18-23 of the antisense strand (counting from the 5′-end).

[0432] In some embodiments, the dsRNA molecule of the disclosure further comprises one phosphorothioate internucleotide linkage modification within positions 1-5 and one within positions 18-23 of the sense strand (counting from the 5′-end), and two phosphorothioate internucleotide linkage modifications at positions 1 and 2, and one phosphorothioate internucleotide linkage modification within positions 18-23 of the antisense strand (counting from the 5′-end).

[0433] In some embodiments, the dsRNA molecule of the disclosure further comprises one phosphorothioate internucleotide linkage modification within position 1-5 (counting from the 5′-end) of the sense strand, and two phosphorothioate internucleotide linkage modifications at positions 1 and 2, and one phosphorothioate internucleotide linkage modification within positions 18-23 of the antisense strand (counting from the 5′-end).

[0434] In some embodiments, the dsRNA molecule of the disclosure further comprises two phosphorothioate internucleotide linkage modifications within position 1-5 (counting from the 5′-end) of the sense strand, and one phosphorothioate internucleotide linkage modification at position 1 or 2, and two phosphorothioate internucleotide linkage modifications within positions 18-23 of the antisense strand (counting from the 5′-end).

[0435] In some embodiments, the dsRNA molecule of the disclosure further comprises two phosphorothioate internucleotide linkage modifications within positions 1-5 and one within positions 18-23 of the sense strand (counting from the 5′-end), and two phosphorothioate internucleotide linkage modifications at positions 1 and 2, and one phosphorothioate internucleotide linkage modification within positions 18-23 of the antisense strand (counting from the 5′-end).

[0436] In some embodiments, the dsRNA molecule of the disclosure further comprises two phosphorothioate internucleotide linkage modifications within positions 1-5 and one phosphorothioate internucleotide linkage modification within positions 18-23 of the sense strand (counting from the 5′-end), and two phosphorothioate internucleotide linkage modifications at positions 1 and 2, and two phosphorothioate internucleotide linkage modifications within positions 18-23 of the antisense strand (counting from the 5′-end).

[0437] In some embodiments, the dsRNA molecule of the disclosure further comprises two phosphorothioate internucleotide linkage modifications within positions 1-5 and one phosphorothioate internucleotide linkage modification within positions 18-23 of the sense strand (counting from the 5′-end), and one phosphorothioate internucleotide linkage modification at position 1 or 2, and two phosphorothioate internucleotide linkage modifications within positions 18-23 of the antisense strand (counting from the 5′-end).

[0438] In some embodiments, the dsRNA molecule of the disclosure further comprises two phosphorothioate internucleotide linkage modifications at positions 1 and 2, and two phosphorothioate internucleotide linkage modifications at positions 20 and 21 of the sense strand (counting from the 5′-end), and one phosphorothioate internucleotide linkage modification at position 1 and one at position 21 of the antisense strand (counting from the 5′-end).

[0439] In some embodiments, the dsRNA molecule of the disclosure further comprises one phosphorothioate internucleotide linkage modification at position 1, and one phosphorothioate internucleotide linkage modification at position 21 of the sense strand (counting from the 5′-end), and two phosphorothioate internucleotide linkage modifications at positions 1 and 2, and two phosphorothioate internucleotide linkage modifications at positions 20 and 21 the antisense strand (counting from the 5′-end).

[0440] In some embodiments, the dsRNA molecule of the disclosure further comprises two phosphorothioate internucleotide linkage modifications at positions 1 and 2, and two phosphorothioate internucleotide linkage modifications at position 21 and 22 of the sense strand (counting from the 5′-end), and one phosphorothioate internucleotide linkage modification at position 1, and one phosphorothioate internucleotide linkage modification at position 21 of the antisense strand (counting from the 5′-end).

[0441] In some embodiments, the dsRNA molecule of the disclosure further comprises one phosphorothioate internucleotide linkage modification at position 1, and one phosphorothioate internucleotide linkage modification at position 21 of the sense strand (counting from the 5′-end), and two phosphorothioate internucleotide linkage modifications at positions 1 and 2, and two phosphorothioate internucleotide linkage modifications at positions 21 and 22 the antisense strand (counting from the 5′-end).

[0442] In some embodiments, the dsRNA molecule of the disclosure further comprises two phosphorothioate internucleotide linkage modifications at positions 1 and 2, and two phosphorothioate internucleotide linkage modifications at position 22 and 23 of the sense strand (counting from the 5′-end), and one phosphorothioate internucleotide linkage modification at positions 1 and one phosphorothioate internucleotide linkage modification at position 21 of the antisense strand (counting from the 5′-end).

[0443] In some embodiments, the dsRNA molecule of the disclosure further comprises one phosphorothioate internucleotide linkage modification at position 1, and one phosphorothioate internucleotide linkage modification at position 21 of the sense strand (counting from the 5′-end), and two phosphorothioate internucleotide linkage modifications at positions 1 and 2, and two phosphorothioate internucleotide linkage modifications at positions 23 and 23 the antisense strand (counting from the 5′-end).

[0444] In some embodiments, compound of the disclosure comprises a pattern of backbone chiral centers. In some embodiments, a common pattern of backbone chiral centers comprises at least 5 internucleotidic linkages in the Sp configuration. In some embodiments, a common pattern of backbone chiral centers comprises at least 6 internucleotidic linkages in the Sp configuration. In some embodiments, a common pattern of backbone chiral centers comprises at least 7 internucleotidic linkages in the Sp configuration. In some embodiments, a common pattern of backbone chiral centers comprises at least 8 internucleotidic linkages in the Sp configuration. In some embodiments, a common pattern of backbone chiral centers comprises at least 9 internucleotidic linkages in the Sp configuration. In some embodiments, a common pattern of backbone chiral centers comprises at least 10 internucleotidic linkages in the Sp configuration. In some embodiments, a common pattern of backbone chiral centers comprises at least 11 internucleotidic linkages in the Sp configuration. In some embodiments, a common pattern of backbone chiral centers comprises at least 12 internucleotidic linkages in the Sp configuration. In some embodiments, a common pattern of backbone chiral centers comprises at least 13 internucleotidic linkages in the Sp configuration. In some embodiments, a common pattern of backbone chiral centers comprises at least 14 internucleotidic linkages in the Sp configuration. In some embodiments, a common pattern of backbone chiral centers comprises at least 15 internucleotidic linkages in the Sp configuration. In some embodiments, a common pattern of backbone chiral centers comprises at least 16 internucleotidic linkages in the Sp configuration. In some embodiments, a common pattern of backbone chiral centers comprises at least 17 internucleotidic linkages in the Sp configuration. In some embodiments, a common pattern of backbone chiral centers comprises at least 18 internucleotidic linkages in the Sp configuration. In some embodiments, a common pattern of backbone chiral centers comprises at least 19 internucleotidic linkages in the Sp configuration. In some embodiments, a common pattern of backbone chiral centers comprises no more than 8 internucleotidic linkages in the Rp configuration. In some embodiments, a common pattern of backbone chiral centers comprises no more than 7 internucleotidic linkages in the Rp configuration. In some embodiments, a common pattern of backbone chiral centers comprises no more than 6 internucleotidic linkages in the Rp configuration. In some embodiments, a common pattern of backbone chiral centers comprises no more than internucleotidic linkages in the Rp configuration. In some embodiments, a common pattern of backbone chiral centers comprises no more than 4 internucleotidic linkages in the Rp configuration. In some embodiments, a common pattern of backbone chiral centers comprises no more than 3 internucleotidic linkages in the Rp configuration. In some embodiments, a common pattern of backbone chiral centers comprises no more than 2 internucleotidic linkages in the Rp configuration. In some embodiments, a common pattern of backbone chiral centers comprises no more than 1 internucleotidic linkages in the Rp configuration. In some embodiments, a common pattern of backbone chiral centers comprises no more than 8 internucleotidic linkages which are not chiral (as a non-limiting example, a phosphodiester). In some embodiments, a common pattern of backbone chiral centers comprises no more than 7 internucleotidic linkages which are not chiral. In some embodiments, a common pattern of backbone chiral centers comprises no more than 6 internucleotidic linkages which are not chiral. In some embodiments, a common pattern of backbone chiral centers comprises no more than 5 internucleotidic linkages which are not chiral. In some embodiments, a common pattern of backbone chiral centers comprises no more than 4 internucleotidic linkages which are not chiral. In some embodiments, a common pattern of backbone chiral centers comprises no more than 3 internucleotidic linkages which are not chiral. In some embodiments, a common pattern of backbone chiral centers comprises no more than 2 internucleotidic linkages which are not chiral. In some embodiments, a common pattern of backbone chiral centers comprises no more than 1 internucleotidic linkages which are not chiral. In some embodiments, a common pattern of backbone chiral centers comprises at least 10 internucleotidic linkages in the Sp configuration, and no more than 8 internucleotidic linkages which are not chiral. In some embodiments, a common pattern of backbone chiral centers comprises at least 11 internucleotidic linkages in the Sp configuration, and no more than 7 internucleotidic linkages which are not chiral. In some embodiments, a common pattern of backbone chiral centers comprises at least 12 internucleotidic linkages in the Sp configuration, and no more than 6 internucleotidic linkages which are not chiral. In some embodiments, a common pattern of backbone chiral centers comprises at least 13 internucleotidic linkages in the Sp configuration, and no more than 6 internucleotidic linkages which are not chiral. In some embodiments, a common pattern of backbone chiral centers comprises at least 14 internucleotidic linkages in the Sp configuration, and no more than 5 internucleotidic linkages which are not chiral. In some embodiments, a common pattern of backbone chiral centers comprises at least 15 internucleotidic linkages in the Sp configuration, and no more than 4 internucleotidic linkages which are not chiral. In some embodiments, the internucleotidic linkages in the Sp configuration are optionally contiguous or not contiguous. In some embodiments, the internucleotidic linkages in the Rp configuration are optionally contiguous or not contiguous. In some embodiments, the internucleotidic linkages which are not chiral are optionally contiguous or not contiguous.

[0445] In some embodiments, compound of the disclosure comprises a block is a stereochemistry block. In some embodiments, a block is an Rp block in that each internucleotidic linkage of the block is Rp. In some embodiments, a 5′-block is an Rp block. In some embodiments, a 3′-block is an Rp block. In some embodiments, a block is an Sp block in that each internucleotidic linkage of the block is Sp. In some embodiments, a 5′-block is an Sp block. In some embodiments, a 3′-block is an Sp block. In some embodiments, provided oligonucleotides comprise both Rp and Sp blocks. In some embodiments, provided oligonucleotides comprise one or more Rp but no Sp blocks. In some embodiments, provided oligonucleotides comprise one or more Sp but no Rp blocks. In some embodiments, provided oligonucleotides comprise one or more PO blocks wherein each internucleotidic linkage in a natural phosphate linkage.

[0446] In some embodiments, compound of the disclosure comprises a 5′-block is an Sp block wherein each sugar moiety comprises a 2′-F modification. In some embodiments, a 5′-block is an Sp block wherein each of internucleotidic linkage is a modified internucleotidic linkage and each sugar moiety comprises a 2′-F modification. In some embodiments, a 5′-block is an Sp block wherein each of internucleotidic linkage is a phosphorothioate linkage and each sugar moiety comprises a 2′-F modification. In some embodiments, a 5′-block comprises 4 or more nucleoside units. In some embodiments, a 5′-block comprises 5 or more nucleoside units. In some embodiments, a 5′-block comprises 6 or more nucleoside units. In some embodiments, a 5′-block comprises 7 or more nucleoside units. In some embodiments, a 3′-block is an Sp block wherein each sugar moiety comprises a 2′-F modification. In some embodiments, a 3′-block is an Sp block wherein each of internucleotidic linkage is a modified internucleotidic linkage and each sugar moiety comprises a 2′-F modification. In some embodiments, a 3′-block is an Sp block wherein each of internucleotidic linkage is a phosphorothioate linkage and each sugar moiety comprises a 2′-F modification. In some embodiments, a 3′-block comprises 4 or more nucleoside units. In some embodiments, a 3′-block comprises 5 or more nucleoside units. In some embodiments, a 3′-block comprises 6 or more nucleoside units. In some embodiments, a 3′-block comprises 7 or more nucleoside units.

[0447] In some embodiments, compound of the disclosure comprises a type of nucleoside in a region or an oligonucleotide is followed by a specific type of internucleotidic linkage, e.g., natural phosphate linkage, modified internucleotidic linkage, Rp chiral internucleotidic linkage, Sp chiral internucleotidic linkage, etc.

[0448] In some embodiments, A is followed by Sp. In some embodiments, A is followed by Rp. In some embodiments, A is followed by natural phosphate linkage (PO). In some embodiments, U is followed by Sp.

[0449] In some embodiments, U is followed by Rp. In some embodiments, U is followed by natural phosphate linkage (PO). In some embodiments, C is followed by Sp. In some embodiments, C is followed by Rp. In some embodiments, C is followed by natural phosphate linkage (PO). In some embodiments, G is followed by Sp. In some embodiments, G is followed by Rp. In some embodiments, G is followed by natural phosphate linkage (PO). In some embodiments, C and U are followed by Sp. In some embodiments, C and U are followed by Rp. In some embodiments, C and U are followed by natural phosphate linkage (PO). In some embodiments, A and G are followed by Sp. In some embodiments, A and G are followed by Rp.

[0450] In some embodiments, the antisense strand comprises phosphorothioate internucleotide linkages between nucleotide positions 21 and 22, and between nucleotide positions 22 and 23, wherein the antisense strand contains at least one thermally destabilizing modification of the duplex located in the seed region of the antisense strand (i.e., at position 2-9 of the 5′-end of the antisense strand), and wherein the dsRNA optionally further has at least one (e.g., one, two, three, four, five, six, seven or all eight) of the following characteristics: (i) the antisense comprises 2, 3, 4, 5 or 6 2′-fluoro modifications; (ii) the antisense comprises 3, 4 or 5 phosphorothioate internucleotide linkages; (iii) the sense strand is conjugated with a ligand; (iv) the sense strand comprises 2, 3, 4 or 5 2′-fluoro modifications; (v) the sense strand comprises 1, 2, 3, 4 or 5 phosphorothioate internucleotide linkages; (vi) the dsRNA comprises at least four 2′-fluoro modifications; (vii) the dsRNA comprises a duplex region of 12-40 nucleotide pairs in length; and (viii) the dsRNA has a blunt end at 5′-end of the antisense strand.

[0451] In some embodiments, the antisense strand comprises phosphorothioate internucleotide linkages between nucleotide positions 1 and 2, between nucleotide positions 2 and 3, between nucleotide positions 21 and 22, and between nucleotide positions 22 and 23, wherein the antisense strand contains at least one thermally destabilizing modification of the duplex located in the seed region of the antisense strand (i.e., at position 2-9 of the 5′-end of the antisense strand), and wherein the dsRNA optionally further has at least one (e.g., one, two, three, four, five, six, seven or all eight) of the following characteristics: (i) the antisense comprises 2, 3, 4, 5 or 6 2′-fluoro modifications; (ii) the sense strand is conjugated with a ligand; (iii) the sense strand comprises 2, 3, 4 or 5 2′-fluoro modifications; (iv) the sense strand comprises 1, 2, 3, 4 or 5 phosphorothioate internucleotide linkages; (v) the dsRNA comprises at least four 2′-fluoro modifications; (vi) the dsRNA comprises a duplex region of 12-40 nucleotide pairs in length; (vii) the dsRNA comprises a duplex region of 12-40 nucleotide pairs in length; and (viii) the dsRNA has a blunt end at 5′-end of the antisense strand.

[0452] In some embodiments, the sense strand comprises phosphorothioate internucleotide linkages between nucleotide positions 1 and 2, and between nucleotide positions 2 and 3, wherein the antisense strand contains at least one thermally destabilizing modification of the duplex located in the seed region of the antisense strand (i.e., at position 2-9 of the 5′-end of the antisense strand), and wherein the dsRNA optionally further has at least one (e.g., one, two, three, four, five, six, seven or all eight) of the following characteristics: (i) the antisense comprises 2, 3, 4, 5 or 6 2′-fluoro modifications; (ii) the antisense comprises 1, 2, 3, 4 or 5 phosphorothioate internucleotide linkages; (iii) the sense strand is conjugated with a ligand; (iv) the sense strand comprises 2, 3, 4 or 5 2′-fluoro modifications; (v) the sense strand comprises 3, 4 or 5 phosphorothioate internucleotide linkages; (vi) the dsRNA comprises at least four 2′-fluoro modifications; (vii) the dsRNA comprises a duplex region of 12-40 nucleotide pairs in length; and (viii) the dsRNA has a blunt end at 5′-end of the antisense strand.

[0453] In some embodiments, the sense strand comprises phosphorothioate internucleotide linkages between nucleotide positions 1 and 2, and between nucleotide positions 2 and 3, the antisense strand comprises phosphorothioate interucleotide linkages between nucleotide positions 1 and 2, between nucleotide positions 2 and 3, between nucleotide positions 21 and 22, and between nucleotide positions 22 and 23, wherein the antisense strand contains at least one thermally destabilizing modification of the duplex located in the seed region of the antisense strand (i.e., at position 2-9 of the 5′-end of the antisense strand), and wherein the dsRNA optionally further has at least one (e.g., one, two, three, four, five, six or all seven) of the following characteristics: (i) the antisense comprises 2, 3, 4, 5 or 6 2′-fluoro modifications; (ii) the sense strand is conjugated with a ligand; (iii) the sense strand comprises 2, 3, 4 or 5 2′-fluoro modifications; (iv) the sense strand comprises 3, 4 or 5 phosphorothioate internucleotide linkages; (v) the dsRNA comprises at least four 2′-fluoro modifications; (vi) the dsRNA comprises a duplex region of 12-40 nucleotide pairs in length; and (vii) the dsRNA has a blunt end at 5′-end of the antisense strand.

[0454] In some embodiments, the dsRNA molecule of the disclosure comprises mismatch(es) with the target, within the duplex, or combinations thereof. The mismatch can occur in the overhang region or the duplex region. The base pair can be ranked on the basis of their propensity to promote dissociation or melting (e.g., on the free energy of association or dissociation of a particular pairing, the simplest approach is to examine the pairs on an individual pair basis, though next neighbor or similar analysis can also be used). In terms of promoting dissociation: A:U is preferred over G:C; G:U is preferred over G:C; and I:C is preferred over G:C (I=inosine). Mismatches, e.g., non-canonical or other than canonical pairings (as described elsewhere herein) are preferred over canonical (A:T, A:U, G:C) pairings; and pairings which include a universal base are preferred over canonical pairings.

[0455] In some embodiments, the dsRNA molecule of the disclosure comprises at least one of the first 1, 2, 3, 4, or 5 base pairs within the duplex regions from the 5′- end of the antisense strand can be chosen independently from the group of A:U, G:U, I:C, and mismatched pairs, e.g., non-canonical or other than canonical pairings or pairings which include a universal base, to promote the dissociation of the antisense strand at the 5′-end of the duplex.

[0456] In some embodiments, the nucleotide at the 1 position within the duplex region from the 5′-end in the antisense strand is selected from the group consisting of A, dA, dU, U, and dT. Alternatively, at least one of the first 1, 2 or 3 base pair within the duplex region from the 5′- end of the antisense strand is an AU base pair. For example, the first base pair within the duplex region from the 5′- end of the antisense strand is an AU base pair.

[0457] It was found that introducing 4′-modified or 5′-modified nucleotide to the 3′-end of a phosphodiester (PO), phosphorothioate (PS), or phosphorodithioate (PS2) linkage of a dinucleotide at any position of single stranded or double stranded oligonucleotide can exert steric effect to the internucleotide linkage and, hence, protecting or stabilizing it against nucleases. In some embodiments, the introduction of a 4′-modified or a 5′-modified nucleotide to the 3′-end of a PO, PS, or PS2 linkage of a dinucleotide modifies the second nucleotide in the dinucleotide pair. In other embodiments, the introduction of a 4′-modified or a 5′-modified nucleotide to the 3′-end of a PO, PS, or PS2 linkage of a dinucleotide modifies the nucleotide at the 3′-end of the dinucleotide pair.

[0458] In some embodiments, 5′-modified nucleotide is introduced at the 3′-end of a dinucleotide at any position of single stranded or double stranded siRNA. For instance, a 5′-alkylated nucleotide may be introduced at the 3′-end of a dinucleotide at any position of single stranded or double stranded siRNA. The alkyl group at the 5′ position of the ribose sugar can be racemic or chirally pure R or S isomer. An exemplary 5′-alkylated nucleotide is 5′-methyl nucleotide. The 5′-methyl can be either racemic or chirally pure R or S isomer.

[0459] In some embodiments, 4′-modified nucleotide is introduced at the 3′-end of a dinucleotide at any position of single stranded or double stranded siRNA. For instance, a 4′-alkylated nucleotide may be introduced at the 3′-end of a dinucleotide at any position of single stranded or double stranded siRNA. The alkyl group at the 4′ position of the ribose sugar can be racemic or chirally pure R or S isomer. An exemplary 4′-alkylated nucleotide is 4′-methyl nucleotide. The 4′-methyl can be either racemic or chirally pure R or S isomer. Alternatively, a 4′-O-alkylated nucleotide may be introduced at the 3′-end of a dinucleotide at any position of single stranded or double stranded siRNA. The 4′-O-alkyl of the ribose sugar can be racemic or chirally pure R or S isomer. An exemplary 4′-O-alkylated nucleotide is 4′-O-methyl nucleotide. The 4′-O-methyl can be either racemic or chirally pure R or S isomer.

[0460] In some embodiments, 5′-alkylated nucleotide is introduced at any position on the sense strand or antisense strand of a dsRNA, and such modification maintains or improves potency of the dsRNA. The 5′-alkyl can be either racemic or chirally pure R or S isomer. An exemplary 5′-alkylated nucleotide is 5′-methyl nucleotide. The 5′-methyl can be either racemic or chirally pure R or S isomer.

[0461] In some embodiments, 4′-alkylated nucleotide is introduced at any position on the sense strand or antisense strand of a dsRNA, and such modification maintains or improves potency of the dsRNA. The 4′-alkyl can be either racemic or chirally pure R or S isomer. An exemplary 4′-alkylated nucleotide is 4′-methyl nucleotide. The 4′-methyl can be either racemic or chirally pure R or S isomer.

[0462] In some embodiments, 4′-O-alkylated nucleotide is introduced at any position on the sense strand or antisense strand of a dsRNA, and such modification maintains or improves potency of the dsRNA. The 5′-alkyl can be either racemic or chirally pure R or S isomer. An exemplary 4′-O-alkylated nucleotide is 4′-O-methyl nucleotide. The 4′-O-methyl can be either racemic or chirally pure R or S isomer.

[0463] In some embodiments, the dsRNA molecule of the disclosure can comprise 2′-5′ linkages (with 2′-H, 2′-OH and 2′-OMe and with P═O or P═S). For example, the 2′-5′ linkages modifications can be used to promote nuclease resistance or to inhibit binding of the sense to the antisense strand, or can be used at the 5′ end of the sense strand to avoid sense strand activation by RISC.

[0464] In another embodiment, the dsRNA molecule of the disclosure can comprise L-sugars (e.g., L-ribose, L-arabinose with 2′-H, 2′-OH and 2′-OMe). For example, these L sugars modifications can be used to promote nuclease resistance or to inhibit binding of the sense to the antisense strand, or can be used at the 5′ end of the sense strand to avoid sense strand activation by RISC.

[0465] Various publications describe multimeric siRNA which can all be used with the dsRNA of the disclosure. Such publications include WO2007/091269, U.S. Pat. No. 7,858,769, WO2010/141511, WO2007/117686, WO2009/014887, and WO2011/031520 which are hereby incorporated by their entirely.

[0466] As described in more detail below, the RNAi agent that contains conjugations of one or more carbohydrate moieties to an RNAi agent may improve one or more properties of the RNAi agent. In many cases, the carbohydrate moiety is attached to a modified subunit of the RNAi agent. For example, the ribose sugar of one or more ribonucleotide subunits of a dsRNA agent can be replaced with another moiety, e.g., a non-carbohydrate (e.g., cyclic) carrier to which is attached a carbohydrate ligand. A ribonucleotide subunit in which the ribose sugar of the subunit has been so replaced is referred to herein as a ribose replacement modification subunit (RRMS). A cyclic carrier may be a carbocyclic ring system, i.e., all ring atoms are carbon atoms, or a heterocyclic ring system, i.e., one or more ring atoms may be a heteroatom, e.g., nitrogen, oxygen, sulfur. The cyclic carrier may be a monocyclic ring system, or may contain two or more rings, e.g. fused rings. The cyclic carrier may be a fully saturated ring system, or it may contain one or more double bonds.

[0467] The ligand may be attached to the polynucleotide via a carrier. The carriers include (i) at least one “backbone attachment point,” such as two “backbone attachment points” and (ii) at least one “tethering attachment point.” A “backbone attachment point” as used herein refers to a functional group, e.g. a hydroxyl group, or generally, a bond available for, and that is suitable for incorporation of the carrier into the backbone, e.g., the phosphate, or modified phosphate, e.g., sulfur containing, backbone, of a ribonucleic acid. A “tethering attachment point” (TAP) in some embodiments refers to a constituent ring atom of the cyclic carrier, e.g., a carbon atom or a heteroatom (distinct from an atom which provides a backbone attachment point), that connects a selected moiety. The moiety can be, e.g., a carbohydrate, e.g. monosaccharide, disaccharide, trisaccharide, tetrasaccharide, oligosaccharide and polysaccharide. Optionally, the selected moiety is connected by an intervening tether to the cyclic carrier. Thus, the cyclic carrier may include a functional group, e.g., an amino group, or generally, provide a bond, that is suitable for incorporation or tethering of another chemical entity, e.g., a ligand to the constituent ring.

[0468] The RNAi agents may be conjugated to a ligand via a carrier, wherein the carrier can be cyclic group or acyclic group. The cyclic group can be selected from pyrrolidinyl, pyrazolinyl, pyrazolidinyl, imidazolinyl, imidazolidinyl, piperidinyl, piperazinyl, [1,3]dioxolane, oxazolidinyl, isoxazolidinyl, morpholinyl, thiazolidinyl, isothiazolidinyl, quinoxalinyl, pyridazinonyl, tetrahydrofuryl and decalinyl. The acyclic group can be selected from serinol backbone or diethanolamine backbone.

[0469] In certain specific embodiments, the RNAi agent for use in the methods of the disclosure is an agent selected from the group of agents listed in any one of Tables 3-7. These agents may further comprise a ligand.

IV. iRNAs Conjugated to Ligands

[0470] Another modification of the RNA of an iRNA of the invention involves chemically linking to the iRNA one or more ligands, moieties or conjugates that enhance the activity, cellular distribution or cellular uptake of the iRNA, e.g., into a cell. Such moieties include but are not limited to lipid moieties such as a cholesterol moiety (Letsinger et al., Proc. Natl. Acid. Sci. USA, 1989, 86: 6553-6556), cholic acid (Manoharan et al., Biorg. Med. Chem. Let., 1994, 4:1053-1060), a thioether, e.g., beryl-S-tritylthiol (Manoharan et al., Ann. N.Y. Acad. Sci., 1992, 660:306-309; Manoharan et al., Biorg. Med. Chem. Let., 1993, 3:2765-2770), a thiocholesterol (Oberhauser et al., Nucl. Acids Res., 1992, 20:533-538), an aliphatic chain, e.g., dodecandiol or undecyl residues (Saison-Behmoaras et al., EMBO J, 1991, 10:1111-1118; Kabanov et al., FEBS Lett., 1990, 259:327-330; Svinarchuk et al., Biochimie, 1993, 75:49-54), a phospholipid, e.g., di-hexadecyl-rac-glycerol or triethyl-ammonium 1,2-di-O-hexadecyl-rac-glycero-3-phosphonate (Manoharan et al., Tetrahedron Lett., 1995, 36:3651-3654; Shea et al., Nucl. Acids Res., 1990, 18:3777-3783), a polyamine or a polyethylene glycol chain (Manoharan et al., Nucleosides & Nucleotides, 1995, 14:969-973), or adamantane acetic acid (Manoharan et al., Tetrahedron Lett., 1995, 36:3651-3654), a palmityl moiety (Mishra et al., Biochim. Biophys. Acta, 1995, 1264:229-237), or an octadecylamine or hexylamino-carbonyloxycholesterol moiety (Crooke et al., J. Pharmacol. Exp. Ther., 1996, 277:923-937).

[0471] In certain embodiments, a ligand alters the distribution, targeting or lifetime of an iRNA agent into which it is incorporated. In some embodiments, a ligand provides an enhanced affinity for a selected target, e.g., molecule, cell or cell type, compartment, e.g., a cellular or organ compartment, tissue, organ or region of the body, as, e.g., compared to a species absent such a ligand. Typical ligands do not take part in duplex pairing in a duplexed nucleic acid.

[0472] Ligands can include a naturally occurring substance, such as a protein (e.g., human serum albumin (HSA), low-density lipoprotein (LDL), or globulin); carbohydrate (e.g., a dextran, pullulan, chitin, chitosan, inulin, cyclodextrin or hyaluronic acid); or a lipid. The ligand may also be a recombinant or synthetic molecule, such as a synthetic polymer, e.g., a synthetic polyamino acid. Examples of polyamino acids include polyamino acid is a polylysine (PLL), poly L-aspartic acid, poly L-glutamic acid, styrene-maleic acid anhydride copolymer, poly(L-lactide-co-glycolied) copolymer, divinyl ether-maleic anhydride copolymer, N-(2-hydroxypropyl)methacrylamide copolymer (HMPA), polyethylene glycol (PEG), polyvinyl alcohol (PVA), polyurethane, poly(2-ethylacryllic acid), N-isopropylacrylamide polymers, or polyphosphazine. Example of polyamines include: polyethylenimine, polylysine (PLL), spermine, spermidine, polyamine, pseudopeptide-polyamine, peptidomimetic polyamine, dendrimer polyamine, arginine, amidine, protamine, cationic lipid, cationic porphyrin, quaternary salt of a polyamine, or an a helical peptide.

[0473] Ligands can also include targeting groups, e.g., a cell or tissue targeting agent, e.g., a lectin, glycoprotein, lipid or protein, e.g., an antibody, that binds to a specified cell type such as a kidney cell. A targeting group can be a thyrotropin, melanotropin, lectin, glycoprotein, surfactant protein A, Mucin carbohydrate, multivalent lactose, multivalent galactose, N-acetyl-galactosamine, N-acetyl-glucosamine multivalent mannose, multivalent fucose, glycosylated polyaminoacids, multivalent galactose, transferrin, bisphosphonate, polyglutamate, polyaspartate, a lipid, cholesterol, a steroid, bile acid, folate, vitamin B12, biotin, or an RGD peptide or RGD peptide mimetic. In certain embodiments, the ligand is a multivalent galactose, e.g., an N-acetyl-galactosamine.

[0474] Other examples of ligands include dyes, intercalating agents (e.g. acridines), cross-linkers (e.g. psoralene, mitomycin C), porphyrins (TPPC4, texaphyrin, Sapphyrin), polycyclic aromatic hydrocarbons (e.g., phenazine, dihydrophenazine), artificial endonucleases (e.g. EDTA), lipophilic molecules, e.g., cholesterol, cholic acid, adamantane acetic acid, 1-pyrene butyric acid, dihydrotestosterone, 1,3-Bis-O(hexadecyl)glycerol, geranyloxyhexyl group, hexadecylglycerol, borneol, menthol, 1,3-propanediol, heptadecyl group, palmitic acid, myristic acid, O3-(oleoyl)lithocholic acid, O3-(oleoyl)cholenic acid, dimethoxytrityl, or phenoxazine) and peptide conjugates (e.g., antennapedia peptide, Tat peptide), alkylating agents, phosphate, amino, mercapto, PEG (e.g., PEG-40K), mPEG, [mPEG]₂, polyamino, alkyl, substituted alkyl, radiolabeled markers, enzymes, haptens (e.g. biotin), transport/absorption facilitators (e.g., aspirin, vitamin E, folic acid), synthetic ribonucleases (e.g., imidazole, bisimidazole, histamine, imidazole clusters, acridine-imidazole conjugates, Eu(3+) complexes oftetraazamacrocycles), dinitrophenyl, HRP, or AP.

[0475] Ligands can be proteins, e.g., glycoproteins, or peptides, e.g., molecules having a specific affinity for a co-ligand, or antibodies e.g., an antibody, that binds to a specified cell type such as a cancer cell, endothelial cell, or bone cell. Ligands may also include hormones and hormone receptors. They can also include non-peptidic species, such as lipids, lectins, carbohydrates, vitamins, cofactors, multivalent lactose, multivalent galactose, N-acetyl-galactosamine, N-acetyl-glucosamine, multivalent mannose, or multivalent fucose. The ligand can be, for example, a lipopolysaccharide, an activator of p 38 MAP kinase, or an activator of NF-κB.

[0476] The ligand can be a substance, e.g., a drug, which can increase the uptake of the iRNA agent into the cell, for example, by disrupting the cell's cytoskeleton, e.g., by disrupting the cell's microtubules, microfilaments, or intermediate filaments. The drug can be, for example, taxol, vincristine, vinblastine, cytochalasin, nocodazole, japlakinolide, latrunculin A, phalloidin, swinholide A, indanocine, or myoservin.

[0477] In some embodiments, a ligand attached to an iRNA as described herein acts as a pharmacokinetic modulator (PK modulator). PK modulators include lipophiles, bile acids, steroids, phospholipid analogues, peptides, protein binding agents, polyethylene glycol (PEG), vitamins etc. Exemplary PK modulators include, but are not limited to, cholesterol, fatty acids, cholic acid, lithocholic acid, dialkylglycerides, diacylglyceride, phospholipids, sphingolipids, naproxen, ibuprofen, vitamin E, biotin etc. Oligonucleotides that comprise a number of phosphorothioate linkages are also known to bind to serum protein, thus short oligonucleotides, e.g., oligonucleotides of about 5 bases, 10 bases, 15 bases or 20 bases, comprising multiple of phosphorothioate linkages in the backbone are also amenable to the present invention as ligands (e.g. as PK modulating ligands). In addition, aptamers that bind serum components (e.g. serum proteins) are also suitable for use as PK modulating ligands in the embodiments described herein.

[0478] Ligand-conjugated iRNAs of the invention may be synthesized by the use of an oligonucleotide that bears a pendant reactive functionality, such as that derived from the attachment of a linking molecule onto the oligonucleotide (described below). This reactive oligonucleotide may be reacted directly with commercially-available ligands, ligands that are synthesized bearing any of a variety of protecting groups, or ligands that have a linking moiety attached thereto.

[0479] The oligonucleotides used in the conjugates of the present invention may be conveniently and routinely made through the well-known technique of solid-phase synthesis. Equipment for such synthesis is sold by several vendors including, for example, Applied Biosystems® (Foster City, Calif). Any other means for such synthesis known in the art may additionally or alternatively be employed. It is also known to use similar techniques to prepare other oligonucleotides, such as the phosphorothioates and alkylated derivatives.

[0480] In the ligand-conjugated oligonucleotides and ligand-molecule bearing sequence-specific linked nucleosides of the present invention, the oligonucleotides and oligonucleosides may be assembled on a suitable DNA synthesizer utilizing standard nucleotide or nucleoside precursors, or nucleotide or nucleoside conjugate precursors that already bear the linking moiety, ligand-nucleotide or nucleoside-conjugate precursors that already bear the ligand molecule, or non-nucleoside ligand-bearing building blocks.

[0481] When using nucleotide-conjugate precursors that already bear a linking moiety, the synthesis of the sequence-specific linked nucleosides is typically completed, and the ligand molecule is then reacted with the linking moiety to form the ligand-conjugated oligonucleotide. In some embodiments, the oligonucleotides or linked nucleosides of the present invention are synthesized by an automated synthesizer using phosphoramidites derived from ligand-nucleoside conjugates in addition to the standard phosphoramidites and non-standard phosphoramidites that are commercially available and routinely used in oligonucleotide synthesis.

### A. Lipid Conjugates

[0482] In certain embodiments, the ligand or conjugate is a lipid or lipid-based molecule. Such a lipid or lipid-based molecule can typically bind a serum protein, such as human serum albumin (HSA). An HSA binding ligand allows for distribution of the conjugate to a target tissue, e.g., a non-kidney target tissue of the body. For example, the target tissue can be the liver, including parenchymal cells of the liver. Other molecules that can bind HSA can also be used as ligands. For example, naproxen or aspirin can be used. A lipid or lipid-based ligand can (a) increase resistance to degradation of the conjugate, (b) increase targeting or transport into a target cell or cell membrane, or (c) can be used to adjust binding to a serum protein, e.g., HSA.

[0483] A lipid-based ligand can be used to modulate, e.g., control (e.g., inhibit) the binding of the conjugate to a target tissue. For example, a lipid or lipid-based ligand that binds to HSA more strongly is less likely to be targeted to the kidney and therefore less likely to be cleared from the body. A lipid or lipid-based ligand that binds to HSA less strongly can be used to target the conjugate to the kidney.

[0484] In certain embodiments, the lipid-based ligand binds HSA. For example, the ligand can bind HSA with a sufficient affinity such that distribution of the conjugate to a non-kidney tissue is enhanced. However, the affinity is typically not so strong that the HSA-ligand binding cannot be reversed.

[0485] In certain embodiments, the lipid-based ligand binds HSA weakly or not at all, such that distribution of the conjugate to the kidney is enhanced. Other moieties that target to kidney cells can also be used in place of or in addition to the lipid-based ligand.

[0486] In another aspect, the ligand is a moiety, e.g., a vitamin, which is taken up by a target cell, e.g., a proliferating cell. These are particularly useful for treating disorders characterized by unwanted cell proliferation, e.g., of the malignant or non-malignant type, e.g., cancer cells. Exemplary vitamins include vitamin A, E, and K. Other exemplary vitamins include are B vitamin, e.g., folic acid, B12, riboflavin, biotin, pyridoxal or other vitamins or nutrients taken up by cancer cells. Also included are HSA and low density lipoprotein (LDL).

### B. Cell Permeation Agents

[0487] In another aspect, the ligand is a cell-permeation agent, such as a helical cell-permeation agent. In certain embodiments, the agent is amphipathic. An exemplary agent is a peptide such as tat or antennopedia. If the agent is a peptide, it can be modified, including a peptidylmimetic, invertomers, non-peptide or pseudo-peptide linkages, and use of D-amino acids. The helical agent is typically an α-helical agent and can have a lipophilic and a lipophobic phase.

[0488] The ligand can be a peptide or peptidomimetic. A peptidomimetic (also referred to herein as an oligopeptidomimetic) is a molecule capable of folding into a defined three-dimensional structure similar to a natural peptide. The attachment of peptide and peptidomimetics to iRNA agents can affect pharmacokinetic distribution of the iRNA, such as by enhancing cellular recognition and absorption. The peptide or peptidomimetic moiety can be about 5-50 amino acids long, e.g., about 5, 10, 15, 20, 25, 30, 35, 40, 45, or 50 amino acids long.

[0489] A peptide or peptidomimetic can be, for example, a cell permeation peptide, cationic peptide, amphipathic peptide, or hydrophobic peptide (e.g., consisting primarily of Tyr, Trp, or Phe). The peptide moiety can be a dendrimer peptide, constrained peptide or crosslinked peptide. In another alternative, the peptide moiety can include a hydrophobic membrane translocation sequence (MTS). An exemplary hydrophobic MTS-containing peptide is RFGF having the amino acid sequence AAVALLPAVLLALLAP (SEQ ID NO: 9). An RFGF analogue (e.g., amino acid sequence AALLPVLLAAP (SEQ ID NO: 10)) containing a hydrophobic MTS can also be a targeting moiety. The peptide moiety can be a “delivery” peptide, which can carry large polar molecules including peptides, oligonucleotides, and protein across cell membranes. For example, sequences from the HIV Tat protein (GRKKRRQRRRPPQ (SEQ ID NO: 1806)) and the Drosophila Antennapedia protein (RQIKIWFQNRRMKWKK (SEQ ID NO: 1807)) have been found to be capable of functioning as delivery peptides. A peptide or peptidomimetic can be encoded by a random sequence of DNA, such as a peptide identified from a phage-display library, or one-bead-one-compound (OBOC) combinatorial library (Lam et al., Nature, 354:82-84, 1991). Typically, the peptide or peptidomimetic tethered to a dsRNA agent via an incorporated monomer unit is a cell targeting peptide such as an arginine-glycine-aspartic acid (RGD)-peptide, or RGD mimic. A peptide moiety can range in length from about 5 amino acids to about 40 amino acids. The peptide moieties can have a structural modification, such as to increase stability or direct conformational properties. Any of the structural modifications described below can be utilized.

[0490] An RGD peptide for use in the compositions and methods of the invention may be linear or cyclic, and may be modified, e.g., glycosylated or methylated, to facilitate targeting to a specific tissue(s). RGD-containing peptides and peptidiomimemtics may include D-amino acids, as well as synthetic RGD mimics. In addition to RGD, one can use other moieties that target the integrin ligand. Preferred conjugates of this ligand target PECAM-1 or VEGF.

[0491] An RGD peptide moiety can be used to target a particular cell type, e.g., a tumor cell, such as an endothelial tumor cell or a breast cancer tumor cell (Zitzmann et al., Cancer Res., 62:5139-43, 2002). An RGD peptide can facilitate targeting of an dsRNA agent to tumors of a variety of other tissues, including the lung, kidney, spleen, or liver (Aoki et al., Cancer Gene Therapy 8:783-787, 2001). Typically, the RGD peptide facilitates targeting of an iRNA agent to the kidney. The RGD peptide can be linear or cyclic, and can be modified, e.g., glycosylated or methylated to facilitate targeting to specific tissues. For example, a glycosylated RGD peptide can deliver an iRNA agent to a tumor cell expressing αvβ₃ (Haubner et al., Jour. Nucl. Med., 42:326-336, 2001).

[0492] A “cell permeation peptide” is capable of permeating a cell, e.g., a microbial cell, such as a bacterial or fungal cell, or a mammalian cell, such as a human cell. A microbial cell-permeating peptide can be, for example, an α-helical linear peptide (e.g., LL-37 or Ceropin P1), a disulfide bond-containing peptide (e.g., α-defensin, β-defensin or bactenecin), or a peptide containing only one or two dominating amino acids (e.g., PR-39 or indolicidin). A cell permeation peptide can also include a nuclear localization signal (NLS). For example, a cell permeation peptide can be a bipartite amphipathic peptide, such as MPG, which is derived from the fusion peptide domain of HIV-1 gp41 and the NLS of SV40 large T antigen (Simeoni et al., Nucl. Acids Res. 31:2717-2724, 2003).

### C. Carbohydrate Conjugates

[0493] In some embodiments of the compositions and methods of the invention, an iRNA further comprises a carbohydrate. The carbohydrate conjugated iRNA are advantageous for the in vivo delivery of nucleic acids, as well as compositions suitable for in vivo therapeutic use, as described herein. As used herein, “carbohydrate” refers to a compound which is either a carbohydrate per se made up of one or more monosaccharide units having at least 6 carbon atoms (which can be linear, branched or cyclic) with an oxygen, nitrogen or sulfur atom bonded to each carbon atom; or a compound having as a part thereof a carbohydrate moiety made up of one or more monosaccharide units each having at least six carbon atoms (which can be linear, branched or cyclic), with an oxygen, nitrogen or sulfur atom bonded to each carbon atom. Representative carbohydrates include the sugars (mono-, di-, tri- and oligosaccharides containing from about 4, 5, 6, 7, 8, or 9 monosaccharide units), and polysaccharides such as starches, glycogen, cellulose and polysaccharide gums. Specific monosaccharides include C5 and above (e.g., C5, C6, C7, or C8) sugars; di- and tri-saccharides include sugars having two or three monosaccharide units (e.g., C5, C6, C7, or C8).

[0494] In certain embodiments, a carbohydrate conjugate comprises a monosaccharide. In certain embodiments, the monosaccharide is an N-acetylgalactosamine (GalNAc). GalNAc conjugates, which comprise one or more N-acetylgalactosamine (GalNAc) derivatives, are described, for example, in U.S. Pat. No. 8,106,022, the entire content of which is hereby incorporated herein by reference. In some embodiments, the GalNAc conjugate serves as a ligand that targets the iRNA to particular cells. In some embodiments, the GalNAc conjugate targets the iRNA to liver cells, e.g., by serving as a ligand for the asialoglycoprotein receptor of liver cells (e.g., hepatocytes).

[0495] In some embodiments, the carbohydrate conjugate comprises one or more GalNAc derivatives. The GalNAc derivatives may be attached via a linker, e.g., a bivalent or trivalent branched linker. In some embodiments the GalNAc conjugate is conjugated to the 3′ end of the sense strand. In some embodiments, the GalNAc conjugate is conjugated to the iRNA agent (e.g., to the 3′ end of the sense strand) via a linker, e.g., a linker as described herein. In some embodiments the GalNAc conjugate is conjugated to the 5′ end of the sense strand. In some embodiments, the GalNAc conjugate is conjugated to the iRNA agent (e.g., to the 5′ end of the sense strand) via a linker, e.g., a linker as described herein.

[0496] In certain embodiments of the invention, the GalNAc or GalNAc derivative is attached to an iRNA agent of the invention via a monovalent linker. In some embodiments, the GalNAc or GalNAc derivative is attached to an iRNA agent of the invention via a bivalent linker. In yet other embodiments of the invention, the GalNAc or GalNAc derivative is attached to an iRNA agent of the invention via a trivalent linker. In other embodiments of the invention, the GalNAc or GalNAc derivative is attached to an iRNA agent of the invention via a tetravalent linker.

[0497] In certain embodiments, the double stranded RNAi agents of the invention comprise one GalNAc or GalNAc derivative attached to the iRNA agent. In certain embodiments, the double stranded RNAi agents of the invention comprise a plurality (e.g., 2, 3, 4, 5, or 6) GalNAc or GalNAc derivatives, each independently attached to a plurality of nucleotides of the double stranded RNAi agent through a plurality of monovalent linkers.

[0498] In some embodiments, for example, when the two strands of an iRNA agent of the invention are part of one larger molecule connected by an uninterrupted chain of nucleotides between the 3′-end of one strand and the 5′-end of the respective other strand forming a hairpin loop comprising, a plurality of unpaired nucleotides, each unpaired nucleotide within the hairpin loop may independently comprise a GalNAc or GalNAc derivative attached via a monovalent linker. The hairpin loop may also be formed by an extended overhang in one strand of the duplex.

[0499] In some embodiments, for example, when the two strands of an iRNA agent of the invention are part of one larger molecule connected by an uninterrupted chain of nucleotides between the 3′-end of one strand and the 5′-end of the respective other strand forming a hairpin loop comprising, a plurality of unpaired nucleotides, each unpaired nucleotide within the hairpin loop may independently comprise a GalNAc or GalNAc derivative attached via a monovalent linker. The hairpin loop may also be formed by an extended overhang in one strand of the duplex.

[0500] In some embodiments, the GalNAc conjugate is

[chemical structure]

[0501] In some embodiments, the RNAi agent is attached to the carbohydrate conjugate via a linker as shown in the following schematic, wherein X is O or S

[chemical structure]

[0502] In some embodiments, the RNAi agent is conjugated to L96 as defined in Table 2 and shown below:

[chemical structure]

[0503] In certain embodiments, a carbohydrate conjugate for use in the compositions and methods of the invention is selected from the group consisting of:

[chemical structure]

[chemical structure]

[chemical structure]

[chemical structure]

[chemical structure]

[chemical structure]

[chemical structure]

[chemical structure]

[0504] In certain embodiments, a carbohydrate conjugate for use in the compositions and methods of the invention is a monosaccharide. In certain embodiments, the monosaccharide is an N-acetylgalactosamine, such as

[chemical structure]

[0505] Another representative carbohydrate conjugate for use in the embodiments described herein includes, but is not limited to,

[chemical structure]

[0506] when one of X or Y is an oligonucleotide, the other is a hydrogen.

[0507] In some embodiments, a suitable ligand is a ligand disclosed in WO 2019/055633, the entire contents of which are incorporated herein by reference. In one embodiment the ligand comprises the structure below:

[chemical structure]

[0508] In certain embodiments, the RNAi agents of the disclosure may include GalNAc ligands, even if such GalNAc ligands are currently projected to be of limited value for the preferred intrathecal/CNS delivery route(s) of the instant disclosure.

[0509] In certain embodiments of the invention, the GalNAc or GalNAc derivative is attached to an iRNA agent of the invention via a monovalent linker. In some embodiments, the GalNAc or GalNAc derivative is attached to an iRNA agent of the invention via a bivalent linker. In yet other embodiments of the invention, the GalNAc or GalNAc derivative is attached to an iRNA agent of the invention via a trivalent linker.

[0510] In one embodiment, the double stranded RNAi agents of the invention comprise one or more GalNAc or GalNAc derivative attached to the iRNA agent. The GalNAc may be attached to any nucleotide via a linker on the sense strand or antsisense strand. The GalNac may be attached to the 5′-end of the sense strand, the 3′ end of the sense strand, the 5′-end of the antisense strand, or the 3′-end of the antisense strand. In one embodiment, the GalNAc is attached to the 3′ end of the sense strand, e.g., via a trivalent linker.

[0511] In other embodiments, the double stranded RNAi agents of the invention comprise a plurality (e.g., 2, 3, 4, 5, or 6) GalNAc or GalNAc derivatives, each independently attached to a plurality of nucleotides of the double stranded RNAi agent through a plurality of linkers, e.g., monovalent linkers.

[0512] In some embodiments, for example, when the two strands of an iRNA agent of the invention is part of one larger molecule connected by an uninterrupted chain of nucleotides between the 3′-end of one strand and the 5′-end of the respective other strand forming a hairpin loop comprising, a plurality of unpaired nucleotides, each unpaired nucleotide within the hairpin loop may independently comprise a GalNAc or GalNAc derivative attached via a monovalent linker.

[0513] In some embodiments, the carbohydrate conjugate further comprises one or more additional ligands as described above, such as, but not limited to, a PK modulator or a cell permeation peptide.

[0514] Additional carbohydrate conjugates and linkers suitable for use in the present invention include those described in WO 2014/179620 and WO 2014/179627, the entire contents of each of which are incorporated herein by reference.

### D. Linkers

[0515] In some embodiments, the conjugate or ligand described herein can be attached to an iRNA oligonucleotide with various linkers that can be cleavable or non-cleavable.

[0516] The term “linker” or “linking group” means an organic moiety that connects two parts of a compound, e.g., covalently attaches two parts of a compound. Linkers typically comprise a direct bond or an atom such as oxygen or sulfur, a unit such as NR8, C(O), C(O)NH, SO, SO₂, SO₂NH or a chain of atoms, such as, but not limited to, substituted or unsubstituted alkyl, substituted or unsubstituted alkenyl, substituted or unsubstituted alkynyl, arylalkyl, arylalkenyl, arylalkynyl, heteroarylalkyl, heteroarylalkenyl, heteroarylalkynyl, heterocyclylalkyl, heterocyclylalkenyl, heterocyclylalkynyl, aryl, heteroaryl, heterocyclyl, cycloalkyl, cycloalkenyl, alkylarylalkyl, alkylarylalkenyl, alkylarylalkynyl, alkenylarylalkyl, alkenylarylalkenyl, alkenylarylalkynyl, alkynylarylalkyl, alkynylarylalkenyl, alkynylarylalkynyl, alkylheteroarylalkyl, alkylheteroarylalkenyl, alkylheteroarylalkynyl, alkenylheteroarylalkyl, alkenylheteroarylalkenyl, alkenylheteroarylalkynyl, alkynylheteroarylalkyl, alkynylheteroarylalkenyl, alkynylheteroarylalkynyl, alkylheterocyclylalkyl, alkylheterocyclylalkenyl, alkylhererocyclylalkynyl, alkenylheterocyclylalkyl, alkenylheterocyclylalkenyl, alkenylheterocyclylalkynyl, alkynylheterocyclylalkyl, alkynylheterocyclylalkenyl, alkynylheterocyclylalkynyl, alkylaryl, alkenylaryl, alkynylaryl, alkylheteroaryl, alkenylheteroaryl, alkynylhereroaryl, which one or more methylenes can be interrupted or terminated by O, S, S(O), SO₂, N(R8), C(O), substituted or unsubstituted aryl, substituted or unsubstituted heteroaryl, substituted or unsubstituted heterocyclic; where R8 is hydrogen, acyl, aliphatic or substituted aliphatic. In certain embodiments, the linker is between about 1-24 atoms, 2-24, 3-24, 4-24, 5-24, 6-24, 6-18, 7-18, 8-18 atoms, 7-17, 8-17, 6-16, 7-16, or 8-16 atoms.

[0517] A cleavable linking group is one which is sufficiently stable outside the cell, but which upon entry into a target cell is cleaved to release the two parts the linker is holding together. In a preferred embodiment, the cleavable linking group is cleaved at least about 10 times, 20, times, 30 times, 40 times, 50 times, 60 times, 70 times, 80 times, 90 times or more, or at least about 100 times faster in a target cell or under a first reference condition (which can, e.g., be selected to mimic or represent intracellular conditions) than in the blood of a subject, or under a second reference condition (which can, e.g., be selected to mimic or represent conditions found in the blood or serum).

[0518] Cleavable linking groups are susceptible to cleavage agents, e.g., pH, redox potential or the presence of degradative molecules. Generally, cleavage agents are more prevalent or found at higher levels or activities inside cells than in serum or blood. Examples of such degradative agents include: redox agents which are selected for particular substrates or which have no substrate specificity, including, e.g., oxidative or reductive enzymes or reductive agents such as mercaptans, present in cells, that can degrade a redox cleavable linking group by reduction; esterases; endosomes or agents that can create an acidic environment, e.g., those that result in a pH of five or lower; enzymes that can hydrolyze or degrade an acid cleavable linking group by acting as a general acid, peptidases (which can be substrate specific), and phosphatases.

[0519] A cleavable linkage group, such as a disulfide bond can be susceptible to pH. The pH of human serum is 7.4, while the average intracellular pH is slightly lower, ranging from about 7.1-7.3. Endosomes have a more acidic pH, in the range of 5.5-6.0, and lysosomes have an even more acidic pH at around 5.0. Some linkers have a cleavable linking group that is cleaved at a preferred pH, thereby releasing a cationic lipid from the ligand inside the cell, or into the desired compartment of the cell.

[0520] A linker can include a cleavable linking group that is cleavable by a particular enzyme. The type of cleavable linking group incorporated into a linker can depend on the cell to be targeted. For example, a liver-targeting ligand can be linked to a cationic lipid through a linker that includes an ester group. Liver cells are rich in esterases, and therefore the linker is cleaved more efficiently in liver cells than in cell types that are not esterase-rich. Other cell-types rich in esterases include cells of the lung, renal cortex, and testis.

[0521] Linkers that contain peptide bonds can be used when targeting cell types rich in peptidases, such as liver cells and synoviocytes.

[0522] In general, the suitability of a candidate cleavable linking group can be evaluated by testing the ability of a degradative agent (or condition) to cleave the candidate linking group. It is also desirable to also test the candidate cleavable linking group for the ability to resist cleavage in the blood or when in contact with other non-target tissue. Thus, one can determine the relative susceptibility to cleavage between a first and a second condition, where the first is selected to be indicative of cleavage in a target cell and the second is selected to be indicative of cleavage in other tissues or biological fluids, e.g., blood or serum. The evaluations can be carried out in cell free systems, in cells, in cell culture, in organ or tissue culture, or in whole animals. It can be useful to make initial evaluations in cell-free or culture conditions and to confirm by further evaluations in whole animals. In preferred embodiments, useful candidate compounds are cleaved at least about 2, 4, 10, 20, 30, 40, 50, 60, 70, 80, 90, or about 100 times faster in the cell (or under in vitro conditions selected to mimic intracellular conditions) as compared to blood or serum (or under in vitro conditions selected to mimic extracellular conditions).

i. Redox Cleavable Linking Groups

[0523] In certain embodiments, a cleavable linking group is a redox cleavable linking group that is cleaved upon reduction or oxidation. An example of reductively cleavable linking group is a disulphide linking group (—S—S—). To determine if a candidate cleavable linking group is a suitable “reductively cleavable linking group,” or for example is suitable for use with a particular iRNA moiety and particular targeting agent one can look to methods described herein. For example, a candidate can be evaluated by incubation with dithiothreitol (DTT), or other reducing agent using reagents know in the art, which mimic the rate of cleavage which would be observed in a cell, e.g., a target cell. The candidates can also be evaluated under conditions which are selected to mimic blood or serum conditions. In one, candidate compounds are cleaved by at most about 10% in the blood. In other embodiments, useful candidate compounds are degraded at least about 2, 4, 10, 20, 30, 40, 50, 60, 70, 80, 90, or about 100 times faster in the cell (or under in vitro conditions selected to mimic intracellular conditions) as compared to blood (or under in vitro conditions selected to mimic extracellular conditions). The rate of cleavage of candidate compounds can be determined using standard enzyme kinetics assays under conditions chosen to mimic intracellular media and compared to conditions chosen to mimic extracellular media.

ii. Phosphate-Based Cleavable Linking Groups

[0524] In certain embodiments, a cleavable linker comprises a phosphate-based cleavable linking group. A phosphate-based cleavable linking group is cleaved by agents that degrade or hydrolyze the phosphate group. An example of an agent that cleaves phosphate groups in cells are enzymes such as phosphatases in cells.

[0525] Examples of phosphate-based linking groups are —O—P(O)(ORk)—O—, —O—P(S)(ORk)—O—, —O—P(S)(SRk)—O—, —S—P(O)(ORk)—O—, —O—P(O)(ORk)—S—, —S—P(O)(ORk)—S—, —O—P(S)(ORk)—S—, —S—P(S)(ORk)—O—, —O—P(O)(Rk)—O—, —O—P(S)(Rk)—O—, —S—P(O)(Rk)—O—, —S—P(S)(Rk)—O—, —S—P(O)(Rk)—S—, —O—P(S)(Rk)—S—. Exemplary embodiments are —O—P(O)(OH)—O—, —O—P(S)(OH)—O—, —O—P(S)(SH)—O—, —S—P(O)(OH)—O—, —O—P(O)(OH)—S—, —S—P(O)(OH)—S—, —O—P(S)(OH)—S—, —S—P(S)(OH)—O—, —O—P(O)(H)—O—, —O—P(S)(H)—O—, —S—P(O)(H)—O, —S—P(S)(H)—O—, —S—P(O)(H)—S—, —O—P(S)(H)—S—, wherein Rk at each occurrence can be, independently, C1-C20 alkyl, C1-C20 haloalkyl, C6-C10 aryl, or C7-C12 aralkyl. In certain embodiments a phosphate-based linking group is —O—P(O)(OH)—O—. These candidates can be evaluated using methods analogous to those described above.

iii. Acid Cleavable Linking Groups

[0526] In certain embodiments, a cleavable linker comprises an acid cleavable linking group. An acid cleavable linking group is a linking group that is cleaved under acidic conditions. In certain embodiments acid cleavable linking groups are cleaved in an acidic environment with a pH of about 6.5 or lower (e.g., about 6.0, 5.75, 5.5, 5.25, 5.0, or lower), or by agents such as enzymes that can act as a general acid. In a cell, specific low pH organelles, such as endosomes and lysosomes can provide a cleaving environment for acid cleavable linking groups. Examples of acid cleavable linking groups include but are not limited to hydrazones, esters, and esters of amino acids. Acid cleavable groups can have the general formula —C═NN—C(O)O, or —OC(O). One exemplary embodiment is when the carbon attached to the oxygen of the ester (the alkoxy group) is an aryl group, substituted alkyl group, or tertiary alkyl group such as dimethyl pentyl or t-butyl. These candidates can be evaluated using methods analogous to those described above.

iv. Ester-Based Cleavable Linking Groups

[0527] In certain embodiments, a cleavable linker comprises an ester-based cleavable linking group. An ester-based cleavable linking group is cleaved by enzymes such as esterases and amidases in cells. Examples of ester-based cleavable linking groups include but are not limited to esters of alkylene, alkenylene and alkynylene groups. Ester cleavable linking groups have the general formula —C(O)O—, or —OC(O)—. These candidates can be evaluated using methods analogous to those described above.

v. Peptide-Based Cleavable Linking Groups

[0528] In yet another embodiment, a cleavable linker comprises a peptide-based cleavable linking group. A peptide-based cleavable linking group is cleaved by enzymes such as peptidases and proteases in cells. Peptide-based cleavable linking groups are peptide bonds formed between amino acids to yield oligopeptides (e.g., dipeptides, tripeptides etc.) and polypeptides. Peptide-based cleavable groups do not include the amide group (—C(O)NH—). The amide group can be formed between any alkylene, alkenylene or alkynelene. A peptide bond is a special type of amide bond formed between amino acids to yield peptides and proteins. The peptide based cleavage group is generally limited to the peptide bond (i.e., the amide bond) formed between amino acids yielding peptides and proteins and does not include the entire amide functional group. Peptide-based cleavable linking groups have the general formula—NHCHR^{A}C(O)NHCHR^{B}C(O)— where R^{A} and R^{B} are the R groups of the two adjacent amino acids. These candidates can be evaluated using methods analogous to those described above.

[0529] In some embodiments, an iRNA of the invention is conjugated to a carbohydrate through a linker. Non-limiting examples of iRNA carbohydrate conjugates with linkers of the compositions and methods of the invention include, but are not limited to,

[chemical structure]

[chemical structure]

[chemical structure]

when one of X or Y is an oligonucleotide, the other is a hydrogen.

[0530] In certain embodiments of the compositions and methods of the invention, a ligand is one or more “GalNAc” (N-acetylgalactosamine) derivatives attached through a bivalent or trivalent branched linker.

[0531] In certain embodiments, a dsRNA of the invention is conjugated to a bivalent or trivalent branched linker selected from the group of structures shown in any of formula (XLV)-(XLVI):

[chemical structure]

[0532] B, q3A, q3B, q4A, q4B, q5A, q5B, and q5C represent independently for each occurrence 0-20 and wherein the repeating unit can be the same or different; P^{2A} P^{2B}, P^{3A}, P^{3B}, P^{4A}, P^{4B} P^{5A} P^{5B} P5C, T^{2A}, T^{2B}, T^{3A}, T^{3B}, T^{4A}, T^{4B}, T^{4A}, T^{5B}, T^{5C} are each independently for each occurrence absent, CO, NH, O, S, OC(O), NHC(O), CH₂, CH₂NH or CH₂O; Q^{2A}, Q^{2B}, Q^{3A}, Q^{3B}, Q^{4A}, Q^{4B}, Q^{5A}, Q^{5B}, Q^{5C} are independently for each occurrence absent, alkylene, substituted alkylene wherein one or more methylenes can be interrupted or terminated by one or more of O, S, S(O), SO₂, N(R^{N}), C(R′)═C(R″), C≡C or C(O); R^{2A}, R^{2B}, R^{3A}, R^{3B}, R^{4A}, R^{4B}, R^{5A}, R^{5B}, R^{5C} are each independently for each occurrence absent, NH, O, S, CH₂, C(O)O, C(O)NH, NHCH(R^{a})C(O), —C(O)—CH(R^{a})—NH—, CO, CH═N—O,

[chemical structure]

or heterocyclyl;

[0533] L^{2A}, L^{2B}, L^{3A}, L^{3B} L^{4A}, L^{4B}, L^{5A}, L^{5B} and L^{5C} represent the ligand; i.e. each independently for each occurrence a monosaccharide (such as GalNAc), disaccharide, trisaccharide, tetrasaccharide, oligosaccharide, or polysaccharide; and R^{a} is H or amino acid side chain. Trivalent conjugating GalNAc derivatives are particularly useful for use with RNAi agents for inhibiting the expression of a target gene, such as those of formula (XLIX):

[chemical structure]

[0534] wherein L^{5A} L^{5B} and L⁵c represent a monosaccharide, such as GalNAc derivative.

[0535] Examples of suitable bivalent and trivalent branched linker groups conjugating GalNAc derivatives include, but are not limited to, the structures recited above as formulas II, VII, XI, X, and XIII.

[0536] Representative U.S. Patents that teach the preparation of RNA conjugates include, but are not limited to, U.S. Pat. Nos. 4,828,979; 4,948,882; 5,218,105; 5,525,465; 5,541,313; 5,545,730; 5,552,538; 5,578,717, 5,580,731; 5,591,584; 5,109,124; 5,118,802; 5,138,045; 5,414,077; 5,486,603; 5,512,439; 5,578,718; 5,608,046; 4,587,044; 4,605,735; 4,667,025; 4,762,779; 4,789,737; 4,824,941; 4,835,263; 4,876,335; 4,904,582; 4,958,013; 5,082,830; 5.112,963; 5,214,136; 5,082,830; 5,112,963; 5,214,136; 5,245,022; 5,254,469; 5,258,506; 5,262,536; 5,272,250; 5,292,873; 5,317,098; 5,371,241, 5,391,723; 5,416,203, 5,451,463; 5,510,475; 5,512,667; 5,514,785; 5,565,552; 5,567,810; 5,574,142; 5,585,481; 5,587,371; 5,595.726; 5,597,696; 5,599,923; 5,599,928; 5,688,941; 6,294,664; 6,320,017; 6,576,752; 6,783,931; 6,900,297; 7,037,646; and 8,106,022, the entire contents of each of which are hereby incorporated herein by reference.

[0537] It is not necessary for all positions in a given compound to be uniformly modified, and in fact more than one of the aforementioned modifications can be incorporated in a single compound or even at a single nucleoside within an iRNA. The present invention also includes iRNA compounds that are chimeric compounds.

[0538] “Chimeric” iRNA compounds or “chimeras,” in the context of this invention, are iRNA compounds, preferably dsRNA agents, that contain two or more chemically distinct regions, each made up of at least one monomer unit, i.e., a nucleotide in the case of a dsRNA compound. These iRNAs typically contain at least one region wherein the RNA is modified so as to confer upon the iRNA increased resistance to nuclease degradation, increased cellular uptake, or increased binding affinity for the target nucleic acid. An additional region of the iRNA can serve as a substrate for enzymes capable of cleaving RNA:DNA or RNA:RNA hybrids. By way of example, RNase H is a cellular endonuclease which cleaves the RNA strand of an RNA:DNA duplex. Activation of RNase H, therefore, results in cleavage of the RNA target, thereby greatly enhancing the efficiency of iRNA inhibition of gene expression. Consequently, comparable results can often be obtained with shorter iRNAs when chimeric dsRNAs are used, compared to phosphorothioate deoxy dsRNAs hybridizing to the same target region. Cleavage of the RNA target can be routinely detected by gel electrophoresis and, if necessary, associated nucleic acid hybridization techniques known in the art.

[0539] In certain instances, the RNA of an iRNA can be modified by a non-ligand group. A number of non-ligand molecules have been conjugated to iRNAs in order to enhance the activity, cellular distribution or cellular uptake of the iRNA, and procedures for performing such conjugations are available in the scientific literature. Such non-ligand moieties have included lipid moieties, such as cholesterol (Kubo, T. et al., Biochem. Biophys. Res. Comm., 2007, 365(1):54-61; Letsinger et al., Proc. Natd. Acad. Sci. USA, 1989, 86:6553), cholic acid (Manoharan et al., Bioorg. Med. Chem. Lett., 1994, 4:1053), a thioether, e.g., hexyl-S-tritylthiol (Manoharan et al., Ann. N Y. Acad. Sci., 1992, 660:306; Manoharan et al., Bioorg. Med. Chem. Let., 1993, 3:2765), a thiocholesterol (Oberhauser et al., Nucl. Acids Res., 1992, 20:533), an aliphatic chain, e.g., dodecandiol or undecyl residues (Saison-Behmoaras et al., EMBO J., 1991, 10:111; Kabanov et al., FEBS Lett., 1990, 259:327; Svinarchuk et al., Biochimie, 1993, 75:49), a phospholipid, e.g., di-hexadecyl-rac-glycerol or triethylammonium 1,2-di-O-hexadecyl-rac-glycero-3-H-phosphonate (Manoharan et al., Tetrahedron Lett., 1995, 36:3651; Shea et al., Nucl. Acids Res., 1990, 18:3777), a polyamine or a polyethylene glycol chain (Manoharan et al., Nucleosides & Nucleotides, 1995, 14:969), or adamantane acetic acid (Manoharan et al., Tetrahedron Lett., 1995, 36:3651), a palmityl moiety (Mishra et al., Biochim. Biophys. Acta, 1995, 1264:229), or an octadecylamine or hexylamino-carbonyl-oxycholesterol moiety (Crooke et al., J. Pharmacol. Exp. Ther., 1996, 277:923). Representative United States patents that teach the preparation of such RNA conjugates have been listed above. Typical conjugation protocols involve the synthesis of RNAs bearing an amino linker at one or more positions of the sequence. The amino group is then reacted with the molecule being conjugated using appropriate coupling or activating reagents. The conjugation reaction can be performed either with the RNA still bound to the solid support or following cleavage of the RNA, in solution phase. Purification of the RNA conjugate by HPLC typically affords the pure conjugate.

### V. Delivery of an RNAi Agent of the Disclosure

[0540] The delivery of an RNAi agent of the disclosure to a cell e.g., a cell within a subject, such as a human subject (e.g., a subject in need thereof, such as a subject having a LRRK2-associated disorder, e.g., LRRK2-associated disease, can be achieved in a number of different ways. For example, delivery may be performed by contacting a cell with an RNAi agent of the disclosure either in vitro or in vivo. In vivo delivery may also be performed directly by administering a composition comprising an RNAi agent, e.g., a dsRNA, to a subject. Alternatively, in vivo delivery may be performed indirectly by administering one or more vectors that encode and direct the expression of the RNAi agent. These alternatives are discussed further below.

[0541] In general, any method of delivering a nucleic acid molecule (in vitro or in vivo) can be adapted for use with an RNAi agent of the disclosure (see e.g., Akhtar S. and Julian RL., (1992) Trends Cell. Biol. 2(5):139-144 and WO94/02595, which are incorporated herein by reference in their entireties). For in vivo delivery, factors to consider in order to deliver an RNAi agent include, for example, biological stability of the delivered agent, prevention of non-specific effects, and accumulation of the delivered agent in the target tissue. The non-specific effects of an RNAi agent can be minimized by local administration, for example, by direct injection or implantation into a tissue or topically administering the preparation. Local administration to a treatment site maximizes local concentration of the agent, limits the exposure of the agent to systemic tissues that can otherwise be harmed by the agent or that can degrade the agent, and permits a lower total dose of the RNAi agent to be administered. Several studies have shown successful knockdown of gene products when an RNAi agent is administered locally. For example, intraocular delivery of a VEGF dsRNA by intravitreal injection in cynomolgus monkeys (Tolentino, M J. et al., (2004) Retina 24:132-138) and subretinal injections in mice (Reich, S J. et al. (2003) Mol. Vis. 9:210-216) were both shown to prevent neovascularization in an experimental model of age-related macular degeneration. In addition, direct intratumoral injection of a dsRNA in mice reduces tumor volume (Pille, J. et al. (2005) Mol. Ther. 11:267-274) and can prolong survival of tumor-bearing mice (Kim, W J. et al., (2006) Mol. Ther. 14:343-350; Li, S. et al., (2007) Mol. Ther. 15:515-523). RNA interference has also shown success with local delivery to the CNS by direct injection (Dorn, G. et al., (2004) Nucleic Acids 32:e49; Tan, P H. et al. (2005) Gene Ther. 12:59-66; Makimura, H. et al (2002) BMC Neurosci. 3:18; Shishkina, G T., et al. (2004) Neuroscience 129:521-528; Thakker, E R., et al. (2004) Proc. Natl. Acad. Sci. U.S.A. 101:17270-17275; Akaneya,Y., et al. (2005) J. Neurophysiol. 93:594-602) and to the lungs by intranasal administration (Howard, K A. et al., (2006) Mol. Ther. 14:476-484; Zhang, X. et al., (2004) J. Biol. Chem. 279:10677-10684; Bitko, V. et al., (2005) Nat. Med. 11:50-55). For administering an RNAi agent systemically for the treatment of a disease, the RNA can be modified or alternatively delivered using a drug delivery system; both methods act to prevent the rapid degradation of the dsRNA by endo- and exo-nucleases in vivo. Modification of the RNA or the pharmaceutical carrier can also permit targeting of the RNAi agent to the target tissue and avoid undesirable off-target effects (e.g., without wishing to be bound by theory, use of GNAs as described herein has been identified to destabilize the seed region of a dsRNA, resulting in enhanced preference of such dsRNAs for on-target effectiveness, relative to off-target effects, as such off-target effects are significantly weakened by such seed region destabilization). RNAi agents can be modified by chemical conjugation to lipophilic groups such as cholesterol to enhance cellular uptake and prevent degradation. For example, an RNAi agent directed against ApoB conjugated to a lipophilic cholesterol moiety was injected systemically into mice and resulted in knockdown of apoB mRNA in both the liver and jejunum (Soutschek, J. et al., (2004) Nature 432:173-178). Conjugation of an RNAi agent to an aptamer has been shown to inhibit tumor growth and mediate tumor regression in a mouse model of prostate cancer (McNamara, J O. et al., (2006) Nat. Biotechnol. 24:1005-1015). In an alternative embodiment, the RNAi agent can be delivered using drug delivery systems such as a nanoparticle, a dendrimer, a polymer, liposomes, or a cationic delivery system. Positively charged cationic delivery systems facilitate binding of molecule RNAi agent (negatively charged) and also enhance interactions at the negatively charged cell membrane to permit efficient uptake of an RNAi agent by the cell. Cationic lipids, dendrimers, or polymers can either be bound to an RNAi agent, or induced to form a vesicle or micelle (see e.g., Kim SH. et al., (2008) Journal of Controlled Release 129(2):107-116) that encases an RNAi agent. The formation of vesicles or micelles further prevents degradation of the RNAi agent when administered systemically. Methods for making and administering cationic—RNAi agent complexes are well within the abilities of one skilled in the art (see e.g., Sorensen, D R., et al. (2003) J. Mol. Biol 327:761-766; Verma, U N. et al., (2003) Clin. Cancer Res. 9:1291-1300; Arnold, A S et al. (2007) J. Hypertens. 25:197-205, which are incorporated herein by reference in their entirety). Some non-limiting examples of drug delivery systems useful for systemic delivery of RNAi agents include DOTAP (Sorensen, D R., et al (2003), supra; Verma, U N. et al., (2003), supra), Oligofectamine, “solid nucleic acid lipid particles” (Zimmermann, T S. et al., (2006) Nature 441:111-114), cardiolipin (Chien, P Y. et al., (2005) Cancer Gene Ther. 12:321-328; Pal, A. et al., (2005) Int. J. Oncol. 26:1087-1091), polyethyleneimine (Bonnet ME. et al., (2008) Pharm. Res. Aug 16 Epub ahead of print; Aigner, A. (2006) J. Biomed. Biotechnol. 71659), Arg-Gly-Asp (RGD) peptides (Liu, S. (2006) Mol. Pharm. 3:472-487), and polyamidoamines (Tomalia, D A. et al., (2007) Biochem. Soc. Trans. 35:61-67; Yoo, H. et al., (1999) Pharm. Res. 16:1799-1804). In some embodiments, an RNAi agent forms a complex with cyclodextrin for systemic administration. Methods for administration and pharmaceutical compositions of RNAi agents and cyclodextrins can be found in U.S. Pat. No. 7,427,605, which is herein incorporated by reference in its entirety.

[0542] Certain aspects of the instant disclosure relate to a method of reducing the expression of a LRRK2 target gene in a cell, comprising contacting said cell with the double-stranded RNAi agent of the disclosure.

[0543] In one embodiment, the cell is an extraheptic cell, optionally a CNS cell, such as a brain cell. In other embodiment, the cell is an extraheptic cell, optionally an ocular cell.

[0544] Another aspect of the disclosure relates to a method of reducing the expression of a LRRK2 target gene in a subject, comprising administering to the subject the double-stranded RNAi agent of the disclosure.

[0545] Another aspect of the disclosure relates to a method of treating a subject having a CNS disorder (neurodegenerative disorder), comprising administering to the subject a therapeutically effective amount of the double-stranded LRRK2-targeting RNAi agent of the disclosure, thereby treating the subject. Exemplary CNS disorders that can be treated by the method of the disclosure include LRRK2-associated disease CNS disorder such as Parkinson's disease.

[0546] Another aspect of the disclosure relates to a method of treating a subject having an ocular system disorder, comprising administering to the subject a therapeutically effective amount of the double-stranded LRRK2-targeting RNAi agent of the disclosure, thereby treating the subject. Exemplary ocular disorders that can be treated by the method of the disclosure include LRRK2-associated ocular diseases such as edema in the eyes, lens, and otic vesicles.

[0547] Non-limiting Exemplary CNS disorders that can be treated by the method of the disclosure include CNS disorder such as tauopathy, Alzheimer disease, frontotemporal dementia (FTD), behavioral variant frontotemporal dementia (bvFTD), nonfluent variant primary progressive aphasia (nfvPPA), primary progressive aphasia—semantic (PPA-S), primary progressive aphasia—logopenic (PPA-L), frontotemporal dementia with parkinsonism linked to chromosome 17 (FTDP-17), Pick's disease (PiD), argyrophilic grain disease (AGD), multiple system tauopathy with presenile dementia (MSTD), white matter tauopathy with globular glial inclusions (FTLD with GGIs), FTLD with MAPT mutations, neurofibrillary tangle (NFT) dementia, FTD with motor neuron disease, amyotrophic lateral sclerosis (ALS), corticobasal syndrome (CBS), corticobasal degeneration (CBD), progressive supranuclear palsy (PSP), Parkinson's disease, postencephalitic Parkinsonism, Niemann-Pick disease, Huntington disease, type 1 myotonic dystrophy, and Down syndrome (DS), Crohn's disease.

[0548] In one embodiment, the double-stranded RNAi agent is administered intrathecally. By intrathecal administration of the double-stranded RNAi agent, the method can reduce the expression of a LRRK2 target gene in a brain (e.g., striatum) or spine tissue, for instance, cortex, cerebellum, cervical spine, lumbar spine, and thoracic spine, immune cells such as monocytes and T-cells.

[0549] For ease of exposition the formulations, compositions and methods in this section are discussed largely with regard to modified siRNA compounds. It may be understood, however, that these formulations, compositions and methods can be practiced with other siRNA compounds, e.g., unmodified siRNA compounds, and such practice is within the disclosure. A composition that includes an RNAi agent can be delivered to a subject by a variety of routes. Exemplary routes include: intrathecal, intravenous, topical, rectal, anal, vaginal, nasal, pulmonary, and ocular.

[0550] The RNAi agents of the disclosure can be incorporated into pharmaceutical compositions suitable for administration. Such compositions typically include one or more species of RNAi agent and a pharmaceutically acceptable carrier. As used herein the language “pharmaceutically acceptable carrier” is intended to include any and all solvents, dispersion media, coatings, antibacterial and antifungal agents, isotonic and absorption delaying agents, and the like, compatible with pharmaceutical administration. The use of such media and agents for pharmaceutically active substances is well known in the art. Except insofar as any conventional media or agent is incompatible with the active compound, use thereof in the compositions is contemplated. Supplementary active compounds can also be incorporated into the compositions.

[0551] The pharmaceutical compositions of the present disclosure may be administered in a number of ways depending upon whether local or systemic treatment is desired and upon the area to be treated. Administration may be topical (including ophthalmic, vaginal, rectal, intranasal, transdermal), intrathecal, oral, or parenteral. Parenteral administration includes intravenous drip, subcutaneous, intraperitoneal or intramuscular injection, or intrathecal or intraventricular administration.

[0552] The route and site of administration may be chosen to enhance targeting. For example, to target neural or spinal tissue, intrathecal injection would be a logical choice. Lung cells might be targeted by administering the RNAi agent in aerosol form. The vascular endothelial cells could be targeted by coating a balloon catheter with the RNAi agent and mechanically introducing the RNA.

[0553] Formulations for topical administration may include transdermal patches, ointments, lotions, creams, gels, drops, suppositories, sprays, liquids, and powders. Conventional pharmaceutical carriers, aqueous, powder or oily bases, thickeners and the like may be necessary or desirable. Coated condoms, gloves and the like may also be useful.

[0554] Compositions for oral administration include powders or granules, suspensions or solutions in water, syrups, elixirs or non-aqueous media, tablets, capsules, lozenges, or troches. In the case of tablets, carriers that can be used include lactose, sodium citrate and salts of phosphoric acid. Various disintegrants such as starch, and lubricating agents such as magnesium stearate, sodium lauryl sulfate and talc, are commonly used in tablets. For oral administration in capsule form, useful diluents are lactose and high molecular weight polyethylene glycols. When aqueous suspensions are required for oral use, the nucleic acid compositions can be combined with emulsifying and suspending agents. If desired, certain sweetening or flavoring agents can be added.

[0555] Compositions for intrathecal or intraventricular administration may include sterile aqueous solutions which may also contain buffers, diluents, and other suitable additives.

[0556] Formulations for parenteral administration may include sterile aqueous solutions which may also contain buffers, diluents, and other suitable additives. Intraventricular injection may be facilitated by an intraventricular catheter, for example, attached to a reservoir. For intravenous use, the total concentration of solutes may be controlled to render the preparation isotonic.

[0557] In one embodiment, the administration of the siRNA compound, e.g., a double-stranded siRNA compound, or ssiRNA compound, composition is parenteral, e.g., intravenous (e.g., as a bolus or as a diffusible infusion), intradermal, intraperitoneal, intramuscular, intrathecal, intraventricular, intracranial, subcutaneous, transmucosal, buccal, sublingual, endoscopic, rectal, oral, vaginal, topical, pulmonary, intranasal, urethral, or ocular. Administration can be provided by the subject or by another person, e.g., a health care provider. The medication can be provided in measured doses or in a dispenser which delivers a metered dose. Selected modes of delivery are discussed in more detail below.

### A. Intrathecal Administration.

[0558] In one embodiment, the double-stranded RNAi agent is delivered by intrathecal injection (i.e., injection into the spinal fluid which bathes the brain and spinal cord tissue). Intrathecal injection of RNAi agents into the spinal fluid can be performed as a bolus injection or via minipumps which can be implanted beneath the skin, providing a regular and constant delivery of siRNA into the spinal fluid. The circulation of the spinal fluid from the choroid plexus, where it is produced, down around the spinal chord and dorsal root ganglia and subsequently up past the cerebellum and over the cortex to the arachnoid granulations, where the fluid can exit the CNS, that, depending upon size, stability, and solubility of the compounds injected, molecules delivered intrathecally could hit targets throughout the entire CNS.

[0559] In some embodiments, the intrathecal administration is via a pump. The pump may be a surgically implanted osmotic pump. In one embodiment, the osmotic pump is implanted into the subarachnoid space of the spinal canal to facilitate intrathecal administration.

[0560] In some embodiments, the intrathecal administration is via an intrathecal delivery system for a pharmaceutical including a reservoir containing a volume of the pharmaceutical agent, and a pump configured to deliver a portion of the pharmaceutical agent contained in the reservoir. More details about this intrathecal delivery system may be found in WO 2015/116658, which is incorporated by reference in its entirety.

[0561] The amount of intrathecally injected RNAi agents may vary from one target gene to another target gene and the appropriate amount that has to be applied may have to be determined individually for each target gene. Typically, this amount ranges from 10 g to 2 mg, preferably 50 g to 1500 μg, more preferably 100 g to 1000 μg.

B. Vector encoded RNAi agents of the Disclosure

[0562] RNAi agents targeting the LRRK2 gene can be expressed from transcription units inserted into DNA or RNA vectors (see, e.g., Couture, A, et al., TIG. (1996), 12:5-10; WO 00/22113, WO00/22114, and U.S. Pat. No. 6,054,299). Expression is preferably sustained (months or longer), depending upon the specific construct used and the target tissue or cell type. These transgenes can be introduced as a linear construct, a circular plasmid, or a viral vector, which can be an integrating or non-integrating vector. The transgene can also be constructed to permit it to be inherited as an extrachromosomal plasmid (Gassmann, et al., (1995) Proc. Natl. Acad. Sci. USA 92:1292).

[0563] The individual strand or strands of an RNAi agent can be transcribed from a promoter on an expression vector. Where two separate strands are to be expressed to generate, for example, a dsRNA, two separate expression vectors can be co-introduced (e.g., by transfection or infection) into a target cell. Alternatively, each individual strand of a dsRNA can be transcribed by promoters both of which are located on the same expression plasmid. In one embodiment, a dsRNA is expressed as inverted repeat polynucleotides joined by a linker polynucleotide sequence such that the dsRNA has a stem and loop structure.

[0564] RNAi agent expression vectors are generally DNA plasmids or viral vectors. Expression vectors compatible with eukaryotic cells, preferably those compatible with vertebrate cells, can be used to produce recombinant constructs for the expression of an RNAi agent as described herein. Delivery of RNAi agent expressing vectors can be systemic, such as by intravenous or intramuscular administration, by administration to target cells ex-planted from the patient followed by reintroduction into the patient, or by any other means that allows for introduction into a desired target cell.

[0565] Viral vector systems which can be utilized with the methods and compositions described herein include, but are not limited to, (a) adenovirus vectors; (b) retrovirus vectors, including but not limited to lentiviral vectors, moloney murine leukemia virus, etc.; (c) adeno-associated virus vectors; (d) herpes simplex virus vectors; (e) SV 40 vectors; (f) polyoma virus vectors; (g) papilloma virus vectors; (h) picornavirus vectors; (i) pox virus vectors such as an orthopox, e.g., vaccinia virus vectors or avipox, e.g. canary pox or fowl pox; and ( ) a helper-dependent or gutless adenovirus. Replication-defective viruses can also be advantageous. Different vectors may or may not become incorporated into the cells' genome. The constructs can include viral sequences for transfection, if desired. Alternatively, the construct can be incorporated into vectors capable of episomal replication, e.g. EPV and EBV vectors. Constructs for the recombinant expression of an RNAi agent generally require regulatory elements, e.g., promoters, enhancers, etc., to ensure the expression of the RNAi agent in target cells. Other aspects to consider for vectors and constructs are known in the art.

### VI. Pharmaceutical Compositions of the Invention

[0566] The present disclosure also includes pharmaceutical compositions and formulations which include the RNAi agents of the disclosure. In one embodiment, provided herein are pharmaceutical compositions containing an RNAi agent, as described herein, and a pharmaceutically acceptable carrier. The pharmaceutical compositions containing the RNAi agent are useful for treating a disease or disorder associated with the expression or activity of LRRK2, e.g., LRRK2-associated disease.

[0567] In some embodiments, the pharmaceutical compositions of the invention are sterile. In another embodiment, the pharmaceutical compositions of the invention are pyrogen free.

[0568] Such pharmaceutical compositions are formulated based on the mode of delivery. One example is compositions that are formulated for systemic administration via parenteral delivery, e.g., by intravenous (IV), intramuscular (IM), or for subcutaneous (subQ) delivery. Another example is compositions that are formulated for direct delivery into the CNS, e.g., by intrathecal or intravitreal routes of injection, optionally by infusion into the brain (e.g., striatum), such as by continuous pump infusion.

[0569] The pharmaceutical compositions of the disclosure may be administered in dosages sufficient to inhibit expression of a LRRK2 gene. In general, a suitable dose of an RNAi agent of the disclosure is in the range of about 0.001 to about 200.0 milligrams per kilogram body weight of the recipient per day, generally in the range of about 1 to 50 mg per kilogram body weight per day.

[0570] A repeat-dose regimen may include administration of a therapeutic amount of an RNAi agent on a regular basis, such as monthly to once every six months. In certain embodiments, the RNAi agent is administered about once per quarter (i.e., about once every three months) to about twice per year.

[0571] After an initial treatment regimen (e.g., loading dose), the treatments can be administered on a less frequent basis.

[0572] In other embodiments, a single dose of the pharmaceutical compositions can be long lasting, such that subsequent doses are administered at not more than 1, 2, 3, or 4 or more month intervals. In some embodiments of the disclosure, a single dose of the pharmaceutical compositions of the disclosure is administered once per month. In other embodiments of the disclosure, a single dose of the pharmaceutical compositions of the disclosure is administered once per quarter to twice per year.

[0573] The skilled artisan will appreciate that certain factors can influence the dosage and timing required to effectively treat a subject, including but not limited to the severity of the disease or disorder, previous treatments, the general health or age of the subject, and other diseases present. Moreover, treatment of a subject with a therapeutically effective amount of a composition can include a single treatment or a series of treatments.

[0574] Advances in mouse genetics have generated a number of mouse models for the study of various human diseases, such as Parkinson's disease that would benefit from reduction in the expression of LRRK2. Such models can be used for in vivo testing of RNAi agents, as well as for determining a therapeutically effective dose. Suitable rodent models are known in the art and include, for example, those described in, for example, Cepeda, et al. (ASN Neuro (2010) 2(2):e00033) and Pouladi, et al. (Nat Reviews (2013) 14:708).

[0575] The pharmaceutical compositions of the present disclosure can be administered in a number of ways depending upon whether local or systemic treatment is desired and upon the area to be treated. Administration can be topical (e.g., by a transdermal patch), pulmonary, e.g., by inhalation or insufflation of powders or aerosols, including by nebulizer; intratracheal, intranasal, epidermal and transdermal, oral or parenteral. Parenteral administration includes intravenous, intraarterial, subcutaneous, intraperitoneal or intramuscular injection or infusion; subdermal, e.g., via an implanted device; or intracranial, e.g., by intraparenchymal, intrathecal or intraventricular, administration.

[0576] The RNAi agents can be delivered in a manner to target a particular tissue, such as the CNS (e.g., neuronal, glial or vascular tissue of the brain).

[0577] Pharmaceutical compositions and formulations for topical administration can include transdermal patches, ointments, lotions, creams, gels, drops, suppositories, sprays, liquids and powders. Conventional pharmaceutical carriers, aqueous, powder or oily bases, thickeners and the like can be necessary or desirable. Coated condoms, gloves and the like can also be useful. Suitable topical formulations include those in which the RNAi agents featured in the disclosure are in admixture with a topical delivery agent such as lipids, liposomes, fatty acids, fatty acid esters, steroids, chelating agents and surfactants. Suitable lipids and liposomes include neutral (e.g., dioleoylphosphatidyl DOPE ethanolamine, dimyristoylphosphatidyl choline DMPC, distearolyphosphatidyl choline) negative (e.g., dimyristoylphosphatidyl glycerol DMPG) and cationic (e.g., dioleoyltetramethylaminopropyl DOTAP and dioleoylphosphatidyl ethanolamine DOTMA). RNAi agents featured in the disclosure can be encapsulated within liposomes or can form complexes thereto, in particular to cationic liposomes. Alternatively, RNAi agents can be complexed to lipids, in particular to cationic lipids. Suitable fatty acids and esters include but are not limited to arachidonic acid, oleic acid, eicosanoic acid, lauric acid, caprylic acid, capric acid, myristic acid, palmitic acid, stearic acid, linoleic acid, linolenic acid, dicaprate, tricaprate, monoolein, dilaurin, glyceryl 1-monocaprate, 1-dodecvlazacycloheptan-2-one, an acylcarnitine, an acylcholine, or a C₁₋₂₀ alkyl ester (e.g., isopropylmyristate IPM), monoglyceride, diglyceride or pharmaceutically acceptable salt thereof. Topical formulations are described in detail in U.S. Pat. No. 6,747,014, which is incorporated herein by reference.

### A. RNAi Agent Formulations Comprising Membranous Molecular Assemblies

[0578] An RNAi agent for use in the compositions and methods of the disclosure can be formulated for delivery in a membranous molecular assembly, e.g., a liposome or a micelle. As used herein, the term “liposome” refers to a vesicle composed of amphiphilic lipids arranged in at least one bilayer, e.g., one bilayer or a plurality of bilayers. Liposomes include unilamellar and multilamellar vesicles that have a membrane formed from a lipophilic material and an aqueous interior. The aqueous portion contains the RNAi agent composition. The lipophilic material isolates the aqueous interior from an aqueous exterior, which typically does not include the RNAi agent composition, although in some examples, it may. Liposomes are useful for the transfer and delivery of active ingredients to the site of action. Because the liposomal membrane is structurally similar to biological membranes, when liposomes are applied to a tissue, the liposomal bilayer fuses with bilayer of the cellular membranes. As the merging of the liposome and cell progresses, the internal aqueous contents that include the RNAi agent are delivered into the cell where the RNAi agent can specifically bind to a target RNA and can mediate RNAi. In some embodiments, the liposomes are also specifically targeted, e.g., to direct the RNAi agent to particular cell types.

[0579] A liposome containing an RNAi agent can be prepared by a variety of methods. In one example, the lipid component of a liposome is dissolved in a detergent so that micelles are formed with the lipid component. For example, the lipid component can be an amphipathic cationic lipid or lipid conjugate. The detergent can have a high critical micelle concentration and may be nonionic. Exemplary detergents include cholate, CHAPS, octylglucoside, deoxycholate, and lauroyl sarcosine. The RNAi agent preparation is then added to the micelles that include the lipid component. The cationic groups on the lipid interact with the RNAi agent and condense around the RNAi agent to form a liposome. After condensation, the detergent is removed, e.g., by dialysis, to yield a liposomal preparation of RNAi agent.

[0580] If necessary a carrier compound that assists in condensation can be added during the condensation reaction, e.g., by controlled addition. For example, the carrier compound can be a polymer other than a nucleic acid (e.g., spermine or spermidine). pH can also be adjusted to favor condensation.

[0581] Methods for producing stable polynucleotide delivery vehicles, which incorporate a polynucleotide/cationic lipid complex as structural components of the delivery vehicle, are further described in, e.g., WO 96/37194, the entire contents of which are incorporated herein by reference. Liposome formation can also include one or more aspects of exemplary methods described in Felgner, P. L. et al., (1987) Proc. Natl. Acad. Sci. USA 8:7413-7417; U.S. Pat. Nos. 4,897,355; 5,171,678; Bangham et al., (1965) M Mol. Biol. 23:238; Olson et al., (1979) Biochim. Biophys. Acta 557:9; Szoka et al., (1978) Proc. Natl. Acad. Sci. 75: 4194; Mayhew et al., (1984) Biochim. Biophys. Acta 775:169; Kim et al., (1983) Biochim. Biophys. Acta 728:339; and Fukunaga et al., (1984) Endocrinol. 115:757. Commonly used techniques for preparing lipid aggregates of appropriate size for use as delivery vehicles include sonication and freeze-thaw plus extrusion (see, e.g., Mayer et al., (1986) Biochim. Biophys. Acta 858:161. Microfluidization can be used when consistently small (50 to 200 nm) and relatively uniform aggregates are desired (Mayhew et al., (1984) Biochim. Biophys. Acta 775:169. These methods are readily adapted to packaging RNAi agent preparations into liposomes.

[0582] Liposomes fall into two broad classes. Cationic liposomes are positively charged liposomes which interact with the negatively charged nucleic acid molecules to form a stable complex. The positively charged nucleic acid/liposome complex binds to the negatively charged cell surface and is internalized in an endosome. Due to the acidic pH within the endosome, the liposomes are ruptured, releasing their contents into the cell cytoplasm (Wang et al. (1987) Biochem. Biophys. Res. Commun., 147:980-985).

[0583] Liposomes, which are pH-sensitive or negatively charged, entrap nucleic acids rather than complex with them. Since both the nucleic acid and the lipid are similarly charged, repulsion rather than complex formation occurs. Nevertheless, some nucleic acid is entrapped within the aqueous interior of these liposomes. pH sensitive liposomes have been used to deliver nucleic acids encoding the thymidine kinase gene to cell monolayers in culture. Expression of the exogenous gene was detected in the target cells (Zhou et al. (1992) Journal of Controlled Release, 19:269-274).

[0584] One major type of liposomal composition includes phospholipids other than naturally-derived phosphatidylcholine. Neutral liposome compositions, for example, can be formed from dimyristoyl phosphatidylcholine (DMPC) or dipalmitoyl phosphatidylcholine (DPPC). Anionic liposome compositions generally are formed from dimyristoyl phosphatidylglycerol, while anionic fusogenic liposomes are formed primarily from dioleoyl phosphatidylethanolamine (DOPE). Another type of liposomal composition is formed from phosphatidylcholine (PC) such as, for example, soybean PC, and egg PC. Another type is formed from mixtures of phospholipid or phosphatidylcholine or cholesterol.

[0585] Examples of other methods to introduce liposomes into cells in vitro and in vivo include U.S. Pat. Nos. 5,283,185; 5,171,678; WO 94/00569; WO 93/24640; WO 91/16024; Felgner, (1994) J. Biol. Chem. 269:2550; Nabel, (1993) Proc. Natl. Acad. Sci. 90:11307; Nabel, (1992) Human Gene Ther. 3:649; Gershon, (1993) Biochem. 32:7143; and Strauss, (1992) EMBO J 11:417.

[0586] Non-ionic liposomal systems have also been examined to determine their utility in the delivery of drugs to the skin, in particular systems comprising non-ionic surfactant and cholesterol. Non-ionic liposomal formulations comprising Novasome™ I (glyceryl dilaurate/cholesterol/polyoxyethylene-10-stearyl ether) and Novasome™ II (glyceryl distearate/cholesterol/polyoxyethylene-10-stearyl ether) were used to deliver cyclosporin-A into the dermis of mouse skin. Results indicated that such non-ionic liposomal systems were effective in facilitating the deposition of cyclosporine A into different layers of the skin (Hu et al., (1994) S. T. P. Pharma. Sci., 4(6):466).

[0587] Liposomes also include “sterically stabilized” liposomes, a term which, as used herein, refers to liposomes comprising one or more specialized lipids that, when incorporated into liposomes, result in enhanced circulation lifetimes relative to liposomes lacking such specialized lipids. Examples of sterically stabilized liposomes are those in which part of the vesicle-forming lipid portion of the liposome (A) comprises one or more glycolipids, such as monosialoganglioside G_{M1}, or (B) is derivatized with one or more hydrophilic polymers, such as a polyethylene glycol (PEG) moiety. While not wishing to be bound by any particular theory, it is thought in the art that, at least for sterically stabilized liposomes containing gangliosides, sphingomyelin, or PEG-derivatized lipids, the enhanced circulation half-life of these sterically stabilized liposomes derives from a reduced uptake into cells of the reticuloendothelial system (RES) (Allen et al., (1987) FEBS Letters, 223:42; Wu et al., (1993) Cancer Research, 53:3765).

[0588] Various liposomes comprising one or more glycolipids are known in the art. Papahadjopoulos et al. (Ann. N.Y. Acad. Sci., (1987), 507:64) reported the ability of monosialoganglioside G_{M1}, galactocerebroside sulfate and phosphatidylinositol to improve blood half-lives of liposomes. These findings were expounded upon by Gabizon et al. (Proc. Natl. Acad. Sci. U.S.A., (1988), 85:6949). U.S. Pat. No. 4,837,028 and WO88/04924, both to Allen et al., disclose liposomes comprising (1) sphingomyelin and (2) the ganglioside G_{M1} or a galactocerebroside sulfate ester. U.S. Pat. No. 5,543,152 (Webb et al.) discloses liposomes comprising sphingomyelin. Liposomes comprising 1,2-sn-dimyristoylphosphatidylcholine are disclosed in WO 97/13499 (Lim et al).

[0589] In one embodiment, cationic liposomes are used. Cationic liposomes possess the advantage of being able to fuse to the cell membrane. Non-cationic liposomes, although not able to fuse as efficiently with the plasma membrane, are taken up by macrophages in vivo and can be used to deliver RNAi agents to macrophages.

[0590] Further advantages of liposomes include: liposomes obtained from natural phospholipids are biocompatible and biodegradable; liposomes can incorporate a wide range of water and lipid soluble drugs; liposomes can protect encapsulated RNAi agents in their internal compartments from metabolism and degradation (Rosoff, in “Pharmaceutical Dosage Forms,” Lieberman, Rieger and Banker (Eds.), 1988, volume 1, p. 245). Important considerations in the preparation of liposome formulations are the lipid surface charge, vesicle size and the aqueous volume of the liposomes.

[0591] A positively charged synthetic cationic lipid, N-[1-(2,3-dioleyloxy)propyl]-N,N,N-trimethylammonium chloride (DOTMA) can be used to form small liposomes that interact spontaneously with nucleic acid to form lipid-nucleic acid complexes which are capable of fusing with the negatively charged lipids of the cell membranes of tissue culture cells, resulting in delivery of RNAi agent (see, e.g., Felgner, P. L. et al., (1987) Proc. Natl. Acad. Sci. USA 8:7413-7417, and U.S. Pat. No. 4,897,355 for a description of DOTMA and its use with DNA).

[0592] A DOTMA analogue, 1,2-bis(oleoyloxy)-3-(trimethylammonia)propane (DOTAP) can be used in combination with a phospholipid to form DNA-complexing vesicles. Lipofectin™ Bethesda Research Laboratories, Gaithersburg, Md.) is an effective agent for the delivery of highly anionic nucleic acids into living tissue culture cells that comprise positively charged DOTMA liposomes which interact spontaneously with negatively charged polynucleotides to form complexes. When enough positively charged liposomes are used, the net charge on the resulting complexes is also positive. Positively charged complexes prepared in this way spontaneously attach to negatively charged cell surfaces, fuse with the plasma membrane, and efficiently deliver functional nucleic acids into, for example, tissue culture cells. Another commercially available cationic lipid, 1,2-bis(oleoyloxy)-3,3-(trimethylammonia)propane (“DOTAP”) (Boehringer Mannheim, Indianapolis, Indiana) differs from DOTMA in that the oleoyl moieties are linked by ester, rather than ether linkages.

[0593] Other reported cationic lipid compounds include those that have been conjugated to a variety of moieties including, for example, carboxyspermine which has been conjugated to one of two types of lipids and includes compounds such as 5-carboxyspermylglycine dioctaoleoylamide (“DOGS”) (Transfectam™ Promega, Madison, Wisconsin) and dipalmitoylphosphatidylethanolamine 5-carboxyspermyl-amide (“DPPES”) (see, e.g., U.S. Pat. No. 5,171,678).

[0594] Another cationic lipid conjugate includes derivatization of the lipid with cholesterol (“DC-Chol”) which has been formulated into liposomes in combination with DOPE (See, Gao, X. and Huang, L., (1991) Biochim. Biophys. Res. Commun. 179:280). Lipopolylysine, made by conjugating polylysine to DOPE, has been reported to be effective for transfection in the presence of serum (Zhou, X. et al., (1991) Biochim. Biophys. Acta 1065:8). For certain cell lines, these liposomes containing conjugated cationic lipids, are said to exhibit lower toxicity and provide more efficient transfection than the DOTMA-containing compositions.

[0595] Other commercially available cationic lipid products include DMRIE and DMRIE-HP (Vical, La Jolla, California) and Lipofectamine (DOSPA) (Life Technology, Inc., Gaithersburg, Maryland). Other cationic lipids suitable for the delivery of oligonucleotides are described in WO 98/39359 and WO 96/37194.

[0596] Liposomal formulations are particularly suited for topical administration with liposomes presenting several advantages over other formulations. Such advantages include reduced side effects related to high systemic absorption of the administered drug, increased accumulation of the administered drug at the desired target, and the ability to administer RNAi agent into the skin. In some implementations, liposomes are used for delivering RNAi agent to epidermal cells and also to enhance the penetration of RNAi agent into dermal tissues, e.g., into skin. For example, the liposomes can be applied topically. Topical delivery of drugs formulated as liposomes to the skin has been documented (see, e.g., Weiner et al., (1992) Journal of Drug Targeting, vol. 2,405-410 and du Plessis et al., (1992) Antiviral Research, 18:259-265; Mannino, R. J. and Fould-Fogerite, S., (1998) Biotechniques 6:682-690; Itani, T. et al., (1987) Gene 56:267-276; Nicolau, C. et al. (1987)Meth. Enzymol. 149:157-176; Straubinger, R. M. and Papahadjopoulos, D. (1983)Meth. Enzymol. 101:512-527; Wang, C. Y. and Huang, L., (1987) Proc. Natl. Acad. Sci. USA 84:7851-7855).

[0597] Non-ionic liposomal systems have also been examined to determine their utility in the delivery of drugs to the skin, in particular systems comprising non-ionic surfactant and cholesterol. Non-ionic liposomal formulations comprising Novasome I (glyceryl dilaurate/cholesterol/polyoxyethylene-10-stearyl ether) and Novasome II (glyceryl distearate/cholesterol/polyoxyethylene-10-stearyl ether) were used to deliver a drug into the dermis of mouse skin. Such formulations with RNAi agent are useful for treating a dermatological disorder.

[0598] Liposomes that include RNAi agents can be made highly deformable. Such deformability can enable the liposomes to penetrate through pore that are smaller than the average radius of the liposome. For example, transfersomes are a type of deformable liposomes. Transferosomes can be made by adding surface edge activators, usually surfactants, to a standard liposomal composition. Transfersomes that include RNAi agent can be delivered, for example, subcutaneously by infection in order to deliver RNAi agent to keratinocytes in the skin. In order to cross intact mammalian skin, lipid vesicles must pass through a series of fine pores, each with a diameter less than 50 nm, under the influence of a suitable transdermal gradient. In addition, due to the lipid properties, these transferosomes can be self-optimizing (adaptive to the shape of pores, e.g., in the skin), self-repairing, and can frequently reach their targets without fragmenting, and often self-loading.

[0599] Other formulations amenable to the present disclosure are described in U.S. provisional application Ser. No. 61/018,616, filed Jan. 2, 2008; 61/018,611, filed Jan. 2, 2008; 61/039,748, filed Mar. 26, 2008; 61/047,087, filed Apr. 22, 2008 and 61/051,528, filed May 8, 2008. PCT application number PCT/US2007/080331, filed Oct. 3, 2007, also describes formulations that are amenable to the present disclosure.

[0600] Transfersomes, yet another type of liposomes, are highly deformable lipid aggregates which are attractive candidates for drug delivery vehicles. Transfersomes can be described as lipid droplets which are so highly deformable that they are easily able to penetrate through pores which are smaller than the droplet. Transfersomes are adaptable to the environment in which they are used, e.g., they are self-optimizing (adaptive to the shape of pores in the skin), self-repairing, frequently reach their targets without fragmenting, and often self-loading. To make transfersomes it is possible to add surface edge-activators, usually surfactants, to a standard liposomal composition. Transfersomes have been used to deliver serum albumin to the skin. The transfersome-mediated delivery of serum albumin has been shown to be as effective as subcutaneous injection of a solution containing serum albumin.

[0601] Surfactants find wide application in formulations such as those described herein, particularly in emulsions (including microemulsions) and liposomes. The most common way of classifying and ranking the properties of the many different types of surfactants, both natural and synthetic, is by the use of the hydrophile/lipophile balance (HLB). The nature of the hydrophilic group (also known as the “head”) provides the most useful means for categorizing the different surfactants used in formulations (Rieger, in Pharmaceutical Dosage Forms, Marcel Dekker, Inc., New York, N.Y., 1988, p. 285).

[0602] If the surfactant molecule is not ionized, it is classified as a nonionic surfactant. Nonionic surfactants find wide application in pharmaceutical and cosmetic products and are usable over a wide range of pH values. In general, their HLB values range from 2 to about 18 depending on their structure. Nonionic surfactants include nonionic esters such as ethylene glycol esters, propylene glycol esters, glyceryl esters, polyglyceryl esters, sorbitan esters, sucrose esters, and ethoxylated esters. Nonionic alkanolamides and ethers such as fatty alcohol ethoxylates, propoxylated alcohols, and ethoxylated/propoxylated block polymers are also included in this class. The polyoxyethylene surfactants are the most popular members of the nonionic surfactant class.

[0603] If the surfactant molecule carries a negative charge when it is dissolved or dispersed in water, the surfactant is classified as anionic. Anionic surfactants include carboxylates such as soaps, acyl lactylates, acyl amides of amino acids, esters of sulfuric acid such as alkyl sulfates and ethoxylated alkyl sulfates, sulfonates such as alkyl benzene sulfonates, acyl isethionates, acyl taurates and sulfosuccinates, and phosphates. The most important members of the anionic surfactant class are the alkyl sulfates and the soaps.

[0604] If the surfactant molecule carries a positive charge when it is dissolved or dispersed in water, the surfactant is classified as cationic. Cationic surfactants include quaternary ammonium salts and ethoxylated amines. The quaternary ammonium salts are the most used members of this class.

[0605] If the surfactant molecule has the ability to carry either a positive or negative charge, the surfactant is classified as amphoteric. Amphoteric surfactants include acrylic acid derivatives, substituted alkylamides, N-alkylbetaines and phosphatides.

[0606] The use of surfactants in drug products, formulations and in emulsions has been reviewed (Rieger, in Pharmaceutical Dosage Forms, Marcel Dekker, Inc., New York, N.Y., 1988, p. 285).

[0607] The RNAi agent for use in the methods of the disclosure can also be provided as micellar formulations. “Micelles” are defined herein as a particular type of molecular assembly in which amphipathic molecules are arranged in a spherical structure such that all the hydrophobic portions of the molecules are directed inward, leaving the hydrophilic portions in contact with the surrounding aqueous phase. The converse arrangement exists if the environment is hydrophobic.

[0608] A mixed micellar formulation suitable for delivery through transdermal membranes may be prepared by mixing an aqueous solution of the siRNA composition, an alkali metal C₈ to C₂₂ alkyl sulphate, and a micelle forming compounds. Exemplary micelle forming compounds include lecithin, hyaluronic acid, pharmaceutically acceptable salts of hyaluronic acid, glycolic acid, lactic acid, chamomile extract, cucumber extract, oleic acid, linoleic acid, linolenic acid, monoolein, monooleates, monolaurates, borage oil, evening of primrose oil, menthol, trihydroxy oxo cholanyl glycine and pharmaceutically acceptable salts thereof, glycerin, polyglycerin, lysine, polylysine, triolein, polyoxyethylene ethers and analogues thereof, polidocanol alkyl ethers and analogues thereof, chenodeoxycholate, deoxycholate, and mixtures thereof. The micelle forming compounds may be added at the same time or after addition of the alkali metal alkyl sulphate. Mixed micelles will form with substantially any kind of mixing of the ingredients but vigorous mixing in order to provide smaller size micelles.

[0609] In one method a first micellar composition is prepared which contains the siRNA composition and at least the alkali metal alkyl sulphate. The first micellar composition is then mixed with at least three micelle forming compounds to form a mixed micellar composition. In another method, the micellar composition is prepared by mixing the siRNA composition, the alkali metal alkyl sulphate and at least one of the micelle forming compounds, followed by addition of the remaining micelle forming compounds, with vigorous mixing.

[0610] Phenol or m-cresol may be added to the mixed micellar composition to stabilize the formulation and protect against bacterial growth. Alternatively, phenol or m-cresol may be added with the micelle forming ingredients. An isotonic agent such as glycerin may also be added after formation of the mixed micellar composition.

[0611] For delivery of the micellar formulation as a spray, the formulation can be put into an aerosol dispenser and the dispenser is charged with a propellant. The propellant, which is under pressure, is in liquid form in the dispenser. The ratios of the ingredients are adjusted so that the aqueous and propellant phases become one, i.e., there is one phase. If there are two phases, it is necessary to shake the dispenser prior to dispensing a portion of the contents, e.g., through a metered valve. The dispensed dose of pharmaceutical agent is propelled from the metered valve in a fine spray.

[0612] Propellants may include hydrogen-containing chlorofluorocarbons, hydrogen-containing fluorocarbons, dimethyl ether and diethyl ether. In certain embodiments, HFA 134a (1,1,1,2 tetrafluoroethane) may be used.

[0613] The specific concentrations of the essential ingredients can be determined by relatively straightforward experimentation. For absorption through the oral cavities, it is often desirable to increase, e.g., at least double or triple, the dosage for through injection or administration through the gastrointestinal tract.

### B. Lipid Particles

[0614] RNAi agents, e.g., dsRNAs of in the disclosure may be fully encapsulated in a lipid formulation, e.g., a LNP, or other nucleic acid-lipid particle.

[0615] As used herein, the term “LNP” refers to a stable nucleic acid-lipid particle. LNPs typically contain a cationic lipid, a non-cationic lipid, and a lipid that prevents aggregation of the particle (e.g., a PEG-lipid conjugate). LNPs are extremely useful for systemic applications, as they exhibit extended circulation lifetimes following intravenous (i.v.) injection and accumulate at distal sites (e.g., sites physically separated from the administration site). LNPs include “pSPLP,” which include an encapsulated condensing agent-nucleic acid complex as set forth in WO00/03683. The particles of the present disclosure typically have a mean diameter of about 50 nm to about 150 nm, more typically about 60 nm to about 130 nm, more typically about 70 nm to about 110 nm, most typically about 70 nm to about 90 nm, and are substantially nontoxic. In addition, the nucleic acids when present in the nucleic acid-lipid particles of the present disclosure are resistant in aqueous solution to degradation with a nuclease. Nucleic acid-lipid particles and their method of preparation are disclosed in, e.g., U.S. Pat. Nos. 5,976,567; 5,981,501; 6,534,484; 6,586,410; 6,815,432; United States Patent Publication No. 2010/0324120 and WO 96/40964.

[0616] In one embodiment, the lipid to drug ratio (mass/mass ratio) (e.g., lipid to dsRNA ratio) will be in the range of from about 1:1 to about 50:1, from about 1:1 to about 25:1, from about 3:l to about 15:1, from about 4:1 to about 10:1, from about 5:1 to about 9:1, or about 6:1 to about 9:1. Ranges intermediate to the above recited ranges are also contemplated to be part of the disclosure.

[0617] Certain specific LNP formulations for delivery of RNAi agents have been described in the art, including, e.g., “LNPO1” formulations as described in, e.g., WO 2008/042973, which is hereby incorporated by reference.

[0618] Additional exemplary lipid-dsRNA formulations are identified in the Table 1 below.

TABLE 1
Additional Exemplary Lipid-dsRNA Formulations

| | | cationic lipid/non-cationic |
|---|---|---|
| | | lipid/cholesterol/PEG-lipid conjugate |
| | Ionizable/Cationic Lipid | Lipid:siRNA ratio |
| SNALP-1 | 1,2-Dilinolenyloxy-N,N- | DLinDMA/DPPC/Cholesterol/PEG- |
| | dimethylaminopropane (DLinDMA) | CDMA |
| | | (57.1/7.1/34.4/1.4) |
| | | lipid:siRNA ~7:1 |
| 2-XTC | 2,2-Dilinoleyl-4-dimethylaminoethyl-[1,3]- | XTC/DPPC/Cholesterol/PEG-CDMA |
| | dioxolane (XTC) | 57.1/7.1/34.4/1.4 |
| | | lipid:siRNA ~7:1 |
| LNP05 | 2,2-Dilinoleyl-4-dimethylaminoethyl-[1,3]- | XTC/DSPC/Cholesterol/PEG-DMG |
| | dioxolane (XTC) | 57.5/7.5/31.5/3.5 |
| | | lipid:siRNA ~6:1 |
| LNP06 | 2,2-Dilinoleyl-4-dimethylaminoethyl-[1,3]- | XTC/DSPC/Cholesterol/PEG-DMG |
| | dioxolane (XTC) | 57.5/7.5/31.5/3.5 |
| | | lipid:siRNA ~11:1 |
| LNP07 | 2,2-Dilinoleyl-4-dimethylaminoethyl-[1,3]- | XTC/DSPC/Cholesterol/PEG-DMG |
| | dioxolane (XTC) | 60/7.5/31/1.5, |
| | | lipid:siRNA ~ 6:1 |
| LNP08 | 2,2-Dilinoley1-4-dimethylaminoethyl-[1,3]- | XTC/DSPC/Cholesterol/PEG-DMG |
| | dioxolane (XTC) | 60/7.5/31/1.5, |
| | | lipid:siRNA ~11:1 |
| LNP09 | 2,2-Dilinoley1-4-dimethylaminoethyl-[1,3]- | XTC/DSPC/Cholesterol/PEG-DMG |
| | dioxolane (XTC) | 50/10/38.5/1.5 |
| | | Lipid:siRNA 10:1 |
| LNP10 | (3aR,5s,6aS)-N,N-dimethyl-2,2- | ALN100/DSPC/Cholesterol/PEG- |
| | di((9Z,12Z)-octadeca-9,12- | DMG |
| | dienyl)tetrahydro-3aH- | 50/10/38.5/1.5 |
| | cyclopenta[d][1,3]dioxol-5-amine | Lipid:siRNA 10:1 |
| | (ALN100) | |
| LNP11 | (6Z,9Z,28Z,31Z)-heptatriaconta-6,9,28,31- | MC-3/DSPC/Cholesterol/PEG-DMG |
| | tetraen-19-yl 4-(dimethylamino)butanoate | 50/10/38.5/1.5 |
| | (MC3) | Lipid:siRNA 10:1 |
| LNP12 | 1,1′-(2-(4-(2-((2-(bis(2- | Tech G1/DSPC/Cholesterol/PEG- |
| | hydroxydodecyl)amino)ethyl)(2- | DMG |
| | hydroxydodecyl)amino)ethyl)piperazin-1- | 50/10/38.5/1.5 |
| | yl)ethylazanediyl)didodecan-2-ol (Tech | Lipid:siRNA 10:1 |
| | G1) | |
| LNP13 | XTC | XTC/DSPC/Chol/PEG-DMG |
| | | 50/10/38.5/1.5 |
| | | Lipid:siRNA: 33:1 |
| LNP14 | MC3 | MC3/DSPC/Chol/PEG-DMG |
| | | 40/15/40/5 |
| | | Lipid:siRNA: 11:1 |
| LNP15 | MC3 | MC3/DSPC/Chol/PEG-DSG/GalNAc- |
| | | PEG-DSG |
| | | 50/10/35/4.5/0.5 |
| | | Lipid:siRNA: 11:1 |
| LNP16 | MC3 | MC3/DSPC/Chol/PEG-DMG |
| | | 50/10/38.5/1.5 |
| | | Lipid:siRNA: 7:1 |
| LNP17 | MC3 | MC3/DSPC/Chol/PEG-DSG |
| | | 50/10/38.5/1.5 |
| | | Lipid:siRNA: 10:1 |
| LNP18 | MC3 | MC3/DSPC/Chol/PEG-DMG |
| | | 50/10/38.5/1.5 |
| | | Lipid:siRNA: 12:1 |
| LNP19 | MC3 | MC3/DSPC/Chol/PEG-DMG |
| | | 50/10/35/5 |
| | | Lipid:siRNA: 8:1 |
| LNP20 | MC3 | MC3/DSPC/Chol/PEG-DPG |
| | | 50/10/38.5/1.5 |
| | | Lipid:siRNA: 10:1 |
| LNP21 | C12-200 | C12-200/DSPC/Chol/PEG-DSG |
| | | 50/10/38.5/1.5 |
| | | Lipid:siRNA: 7:1 |
| LNP22 | XTC | XTC/DSPC/Chol/PEG-DSG |
| | | 50/10/38.5/1.5 |
| | | Lipid:siRNA: 10:1 |

DSPC: distearoylphosphatidylcholine; DPPC: dipalmitoylphosphatidylcholine; PEG-DMG: PEG-didimyristoyl glycerol (C14-PEG, or PEG-C14) (PEG with avg mol wt of 2000); PEG-DSG: PEG-distyryl glycerol (C18-PEG, or PEG-C18) (PEG with avg mol wt of 2000);
PEG-cDMA: PEG-carbamoyl-1,2-dimyristyloxypropylamine (PEG with avg mol wt of 2000) and SNALP (1,2-Dilinolenyloxy-N,N-dimethylaminopropane (DLinDMA)) comprising formulations are described in WO 2009/127060, which is hereby incorporated by reference.

[0619] XTC comprising formulations are described in WO 2010/088537, the entire contents of which are hereby incorporated herein by reference.

[0620] MC3 comprising formulations are described, e.g., in United States Patent Publication No. 2010/0324120, the entire contents of which are hereby incorporated by reference.

[0621] ALNY-100 comprising formulations are described in WO 2010/054406, the entire contents of which are hereby incorporated herein by reference.

[0622] C12-200 comprising formulations are described in WO 2010/129709, the entire contents of which are hereby incorporated herein by reference.

[0623] Compositions and formulations for oral administration include powders or granules, microparticulates, nanoparticulates, suspensions or solutions in water or non-aqueous media, capsules, gel capsules, sachets, tablets or minitablets. Thickeners, flavoring agents, diluents, emulsifiers, dispersing aids or binders can be desirable. In some embodiments, oral formulations are those in which dsRNAs featured in the disclosure are administered in conjunction with one or more penetration enhancer surfactants and chelators. Suitable surfactants include fatty acids or esters or salts thereof, bile acids or salts thereof. Suitable bile acids/salts include chenodeoxycholic acid (CDCA) and ursodeoxychenodeoxycholic acid (UDCA), cholic acid, dehydrocholic acid, deoxycholic acid, glucholic acid, glycholic acid, glycodeoxycholic acid, taurocholic acid, taurodeoxycholic acid, sodium tauro-24,25-dihydro-fusidate and sodium glycodihydrofusidate. Suitable fatty acids include arachidonic acid, undecanoic acid, oleic acid, lauric acid, caprylic acid, capric acid, myristic acid, palmitic acid, stearic acid, linoleic acid, linolenic acid, dicaprate, tricaprate, monoolein, dilaurin, glyceryl 1-monocaprate, 1-dodecylazacycloheptan-2-one, an acylcarnitine, an acylcholine, or a monoglyceride, a diglyceride or a pharmaceutically acceptable salt thereof (e.g., sodium). In some embodiments, combinations of penetration enhancers are used, for example, fatty acids/salts in combination with bile acids/salts. One exemplary combination is the sodium salt of lauric acid, capric acid and UDCA. Further penetration enhancers include polyoxvethylene-9-lauryl ether, polyoxyethylene-20-cetyl ether. DsRNAs featured in the disclosure can be delivered orally, in granular form including sprayed dried particles, or complexed to form micro or nanoparticles. DsRNA complexing agents include poly-amino acids; polyimines; polyacrylates; polyalkylacrylates, polyoxethanes, polyalkylcyanoacrylates; cationized gelatins, albumins, starches, acrylates, polyethyleneglycols (PEG) and starches; polyalkylcyanoacrylates; DEAE-derivatized polyimines, pollulans, celluloses and starches. Suitable complexing agents include chitosan, N-trimethylchitosan, poly-L-lysine, polyhistidine, polyomithine, polyspermines, protamine, polyvinylpyridine, polythiodiethylaminomethylethylene P(TDAE), polyaminostyrene (e.g., p-amino), poly(methylcyanoacrylate), poly(ethylcyanoacrylate), poly(butylcyanoacrylate), poly(isobutylcyanoacrylate), poly(isohexylcynaoacrylate), DEAE-methacrylate, DEAE-hexylacrylate, DEAE-acrylamide, DEAE-albumin and DEAE-dextran, polymethylacrylate, polyhexylacrylate, poly(D,L-lactic acid), poly(DL-lactic-co-glycolic acid (PLGA), alginate, and polyethyleneglycol (PEG). Oral formulations for dsRNAs and their preparation are described in detail in U.S. Pat. No. 6,887,906, U.S. 2003/0027780, and U.S. Pat. No. 6,747,014, each of which is incorporated herein by reference.

[0624] Compositions and formulations for parenteral, intraparenchymal (into the brain), intrathecal, intraventricular or intrahepatic administration can include sterile aqueous solutions which can also contain buffers, diluents and other suitable additives such as, but not limited to, penetration enhancers, carrier compounds and other pharmaceutically acceptable carriers or excipients.

[0625] Pharmaceutical compositions of the present disclosure include, but are not limited to, solutions, emulsions, and liposome-containing formulations. These compositions can be generated from a variety of components that include, but are not limited to, preformed liquids, self-emulsifying solids and self-emulsifying semisolids. Particularly preferred are formulations that target the brain when treating LRRK2-associated diseases or disorders.

[0626] The pharmaceutical formulations of the present disclosure, which can conveniently be presented in unit dosage form, can be prepared according to conventional techniques well known in the pharmaceutical industry. Such techniques include the step of bringing into association the active ingredients with the pharmaceutical carrier(s) or excipient(s). In general, the formulations are prepared by uniformly and intimately bringing into association the active ingredients with liquid carriers or finely divided solid carriers or both, and then, if necessary, shaping the product.

[0627] The compositions of the present disclosure can be formulated into any of many possible dosage forms such as, but not limited to, tablets, capsules, gel capsules, liquid syrups, soft gels, suppositories, and enemas. The compositions of the present disclosure can also be formulated as suspensions in aqueous, non-aqueous or mixed media. Aqueous suspensions can further contain substances which increase the viscosity of the suspension including, for example, sodium carboxymethylcellulose, sorbitol or dextran. The suspension can also contain stabilizers.

### C. Additional Formulations

i. Emulsions

[0628] The compositions of the present disclosure can be prepared and formulated as emulsions. Emulsions are typically heterogeneous systems of one liquid dispersed in another in the form of droplets usually exceeding 0.1 m in diameter (see e.g., Ansel's Pharmaceutical Dosage Forms and Drug Delivery Systems, Allen, LV., Popovich NG., and Ansel HC., 2004, Lippincott Williams & Wilkins (8th ed.), New York, NY; Idson, in Pharmaceutical Dosage Forms, Lieberman, Rieger and Banker (Eds.), 1988, Marcel Dekker, Inc., New York, N.Y., volume 1, p. 199; Rosoff, in Pharmaceutical Dosage Forms, Lieberman, Rieger and Banker (Eds.), 1988, Marcel Dekker, Inc., New York, N.Y., Volume 1, p. 245; Block in Pharmaceutical Dosage Forms, Lieberman, Rieger and Banker (Eds.), 1988, Marcel Dekker, Inc., New York, N.Y., volume 2, p. 335; Higuchi et al., in Remington's Pharmaceutical Sciences, Mack Publishing Co., Easton, Pa., 1985, p. 301). Emulsions are often biphasic systems comprising two immiscible liquid phases intimately mixed and dispersed with each other. In general, emulsions can be of either the water-in-oil (w/o) or the oil-in-water (o/w) variety. When an aqueous phase is finely divided into and dispersed as minute droplets into a bulk oily phase, the resulting composition is called a water-in-oil (w/o) emulsion. Alternatively, when an oily phase is finely divided into and dispersed as minute droplets into a bulk aqueous phase, the resulting composition is called an oil-in-water (o/w) emulsion. Emulsions can contain additional components in addition to the dispersed phases, and the active drug which can be present as a solution in either aqueous phase, oily phase or itself as a separate phase. Pharmaceutical excipients such as emulsifiers, stabilizers, dyes, and antioxidants can also be present in emulsions as needed. Pharmaceutical emulsions can also be multiple emulsions that are comprised of more than two phases such as, for example, in the case of oil-in-water-in-oil (o/w/o) and water-in-oil-in-water (w/o/w) emulsions. Such complex formulations often provide certain advantages that simple binary emulsions do not. Multiple emulsions in which individual oil droplets of an o/w emulsion enclose small water droplets constitute a w/o/w emulsion. Likewise, a system of oil droplets enclosed in globules of water stabilized in an oily continuous phase provides an o/w/o emulsion.

[0629] Emulsions are characterized by little or no thermodynamic stability. Often, the dispersed or discontinuous phase of the emulsion is well dispersed into the external or continuous phase and maintained in this form through the means of emulsifiers or the viscosity of the formulation. Either of the phases of the emulsion can be a semisolid or a solid, as is the case of emulsion-style ointment bases and creams. Other means of stabilizing emulsions entail the use of emulsifiers that can be incorporated into either phase of the emulsion. Emulsifiers can broadly be classified into four categories: synthetic surfactants, naturally occurring emulsifiers, absorption bases, and finely dispersed solids (see e.g., Ansel's Pharmaceutical Dosage Forms and Drug Delivery Systems, Allen, LV., Popovich NG., and Ansel HC., 2004, Lippincott Williams & Wilkins (8th ed.), New York, NY; Idson, in Pharmaceutical Dosage Forms, Lieberman, Rieger and Banker (Eds.), 1988, Marcel Dekker, Inc., New York, N.Y., volume 1, p. 199).

[0630] Synthetic surfactants, also known as surface active agents, have found wide applicability in the formulation of emulsions and have been reviewed in the literature (see e.g., Ansel's Pharmaceutical Dosage Forms and Drug Delivery Systems, Allen, LV., Popovich NG., and Ansel HC., 2004, Lippincott Williams & Wilkins (8th ed.), New York, NY; Rieger, in Pharmaceutical Dosage Forms, Lieberman, Rieger and Banker (Eds.), 1988, Marcel Dekker, Inc., New York, N.Y., volume 1, p. 285; Idson, in Pharmaceutical Dosage Forms, Lieberman, Rieger and Banker (Eds.), Marcel Dekker, Inc., New York, N.Y., 1988, volume 1, p. 199). Surfactants are typically amphiphilic and comprise a hydrophilic and a hydrophobic portion. The ratio of the hydrophilic to the hydrophobic nature of the surfactant has been termed the hydrophile/lipophile balance (HLB) and is a valuable tool in categorizing and selecting surfactants in the preparation of formulations. Surfactants can be classified into different classes based on the nature of the hydrophilic group: nonionic, anionic, cationic and amphoteric (see e.g., Ansel's Pharmaceutical Dosage Forms and Drug Delivery Systems, Allen, LV., Popovich NG., and Ansel HC., 2004, Lippincott Williams & Wilkins (8th ed.), New York, NY Rieger, in Pharmaceutical Dosage Forms, Lieberman, Rieger and Banker (Eds.), 1988, Marcel Dekker, Inc., New York, N.Y., volume 1, p. 285).

[0631] Naturally occurring emulsifiers used in emulsion formulations include lanolin, beeswax, phosphatides, lecithin and acacia. Absorption bases possess hydrophilic properties such that they can soak up water to form w/o emulsions yet retain their semisolid consistencies, such as anhydrous lanolin and hydrophilic petrolatum. Finely divided solids have also been used as good emulsifiers especially in combination with surfactants and in viscous preparations. These include polar inorganic solids, such as heavy metal hydroxides, nonswelling clays such as bentonite, attapulgite, hectorite, kaolin, montmorillonite, colloidal aluminum silicate and colloidal magnesium aluminum silicate, pigments and nonpolar solids such as carbon or glyceryl tristearate.

[0632] A large variety of non-emulsifying materials are also included in emulsion formulations and contribute to the properties of emulsions. These include fats, oils, waxes, fatty acids, fatty alcohols, fatty esters, humectants, hydrophilic colloids, preservatives and antioxidants (Block, in Pharmaceutical Dosage Forms, Lieberman, Rieger and Banker (Eds.), 1988, Marcel Dekker, Inc., New York, N.Y., volume 1, p. 335; Idson, in Pharmaceutical Dosage Forms, Lieberman, Rieger and Banker (Eds.), 1988, Marcel Dekker, Inc., New York, N.Y., volume 1, p. 199).

[0633] Hydrophilic colloids or hydrocolloids include naturally occurring gums and synthetic polymers such as polysaccharides (for example, acacia, agar, alginic acid, carrageenan, guar gum, karaya gum, and tragacanth), cellulose derivatives (for example, carboxymethylcellulose and carboxypropylcellulose), and synthetic polymers (for example, carbomers, cellulose ethers, and carboxyvinyl polymers). These disperse or swell in water to form colloidal solutions that stabilize emulsions by forming strong interfacial films around the dispersed-phase droplets and by increasing the viscosity of the external phase.

[0634] Since emulsions often contain a number of ingredients such as carbohydrates, proteins, sterols and phosphatides that can readily support the growth of microbes, these formulations often incorporate preservatives. Commonly used preservatives included in emulsion formulations include methyl paraben, propyl paraben, quaternary ammonium salts, benzalkonium chloride, esters of p-hydroxybenzoic acid, and boric acid. Antioxidants are also commonly added to emulsion formulations to prevent deterioration of the formulation. Antioxidants used can be free radical scavengers such as tocopherols, alkyl gallates, butylated hydroxyanisole, butylated hydroxytoluene, or reducing agents such as ascorbic acid and sodium metabisulfite, and antioxidant synergists such as citric acid, tartaric acid, and lecithin.

[0635] The application of emulsion formulations via dermatological, oral and parenteral routes and methods for their manufacture have been reviewed in the literature (see e.g., Ansel's Pharmaceutical Dosage Forms and Drug Delivery Systems, Allen, LV., Popovich NG., and Ansel HC., 2004, Lippincott Williams & Wilkins (8th ed.), New York, NY; Idson, in Pharmaceutical Dosage Forms, Lieberman, Rieger and Banker (Eds.), 1988, Marcel Dekker, Inc., New York, N.Y., volume 1, p. 199). Emulsion formulations for oral delivery have been very widely used because of ease of formulation, as well as efficacy from an absorption and bioavailability standpoint (see e.g., Ansel's Pharmaceutical Dosage Forms and Drug Delivery Systems, Allen, LV., Popovich NG., and Ansel HC., 2004, Lippincott Williams & Wilkins (8th ed.), New York, NY; Rosoff, in Pharmaceutical Dosage Forms, Lieberman, Rieger and Banker (Eds.), 1988, Marcel Dekker, Inc., New York, N.Y., volume 1, p. 245; Idson, in Pharmaceutical Dosage Forms, Lieberman, Rieger and Banker (Eds.), 1988, Marcel Dekker, Inc., New York, N.Y., volume 1, p. 199). Mineral-oil base laxatives, oil-soluble vitamins and high fat nutritive preparations are among the materials that have commonly been administered orally as o/w emulsions.

ii. Microemulsions

[0636] In one embodiment of the present disclosure, the compositions of RNAi agents and nucleic acids are formulated as microemulsions. A microemulsion can be defined as a system of water, oil and amphiphile which is a single optically isotropic and thermodynamically stable liquid solution (see e.g., Ansel's Pharmaceutical Dosage Forms and Drug Delivery Systems, Allen, LV., Popovich NG., and Ansel HC., 2004, Lippincott Williams & Wilkins (8th ed.), New York, NY; Rosoff, in Pharmaceutical Dosage Forms, Lieberman, Rieger and Banker (Eds.), 1988, Marcel Dekker, Inc., New York, N.Y., volume 1, p. 245). Typically, microemulsions are systems that are prepared by first dispersing an oil in an aqueous surfactant solution and then adding a sufficient amount of a fourth component, generally an intermediate chain-length alcohol to form a transparent system. Therefore, microemulsions have also been described as thermodynamically stable, isotropically clear dispersions of two immiscible liquids that are stabilized by interfacial films of surface-active molecules (Leung and Shah, in: Controlled Release of Drugs: Polymers and Aggregate Systems, Rosoff, M., Ed., 1989, VCH Publishers, New York, pages 185-215). Microemulsions commonly are prepared via a combination of three to five components that include oil, water, surfactant, cosurfactant and electrolyte. Whether the microemulsion is of the water-in-oil (w/o) or an oil-in-water (o/w) type is dependent on the properties of the oil and surfactant used, and on the structure and geometric packing of the polar heads and hydrocarbon tails of the surfactant molecules (Schott, in Remington's Pharmaceutical Sciences, Mack Publishing Co., Easton, Pa., 1985, p. 271).

[0637] The phenomenological approach utilizing phase diagrams has been extensively studied and has yielded a comprehensive knowledge, to one skilled in the art, of how to formulate microemulsions (see e.g., Ansel's Pharmaceutical Dosage Forms and Drug Delivery Systems, Allen, LV., Popovich NG., and Ansel HC., 2004, Lippincott Williams & Wilkins (8th ed.), New York, NY; Rosoff, in Pharmaceutical Dosage Forms, Lieberman, Rieger and Banker (Eds.), 1988, Marcel Dekker, Inc., New York, N.Y., volume 1, p. 245; Block, in Pharmaceutical Dosage Forms, Lieberman, Rieger and Banker (Eds.), 1988, Marcel Dekker, Inc., New York, N.Y., volume 1, p. 335). Compared to conventional emulsions, microemulsions offer the advantage of solubilizing water-insoluble drugs in a formulation of thermodynamically stable droplets that are formed spontaneously.

[0638] Surfactants used in the preparation of microemulsions include, but are not limited to, ionic surfactants, non-ionic surfactants, Brij 96, polyoxyethylene oleyl ethers, polyglycerol fatty acid esters, tetraglycerol monolaurate (ML310), tetraglycerol monooleate (MO310), hexaglycerol monooleate (PO310), hexaglycerol pentaoleate (PO500), decaglycerol monocaprate (MCA750), decaglycerol monooleate (MO750), decaglycerol sequioleate (SO750), decaglycerol decaoleate (DAO750), alone or in combination with cosurfactants. The cosurfactant, usually a short-chain alcohol such as ethanol, 1-propanol, and 1-butanol, serves to increase the interfacial fluidity by penetrating into the surfactant film and consequently creating a disordered film because of the void space generated among surfactant molecules. Microemulsions can, however, be prepared without the use of cosurfactants and alcohol-free self-emulsifying microemulsion systems are known in the art. The aqueous phase can typically be, but is not limited to, water, an aqueous solution of the drug, glycerol, PEG300, PEG400, polyglycerols, propylene glycols, and derivatives of ethylene glycol. The oil phase can include, but is not limited to, materials such as Captex 300, Captex 355, Capmul MCM, fatty acid esters, medium chain (C8-C12) mono, di, and tri-glycerides, polyoxyethylated glyceryl fatty acid esters, fatty alcohols, polyglycolized glycerides, saturated polyglycolized C8-C10 glycerides, vegetable oils and silicone oil.

[0639] Microemulsions are particularly of interest from the standpoint of drug solubilization and the enhanced absorption of drugs. Lipid based microemulsions (both o/w and w/o) have been proposed to enhance the oral bioavailability of drugs, including peptides (see e.g., U.S. Pat. Nos. 6,191,105; 7,063,860; 7,070,802; 7,157,099; Constantinides et al., Pharmaceutical Research, 1994, 11, 1385-1390; Ritschel, Meth. Find. Exp. Clin. Pharmacol., 1993, 13, 205). Microemulsions afford advantages of improved drug solubilization, protection of drug from enzymatic hydrolysis, possible enhancement of drug absorption due to surfactant-induced alterations in membrane fluidity and permeability, ease of preparation, ease of oral administration over solid dosage forms, improved clinical potency, and decreased toxicity (see e.g., U.S. Pat. Nos. 6.191,105; 7,063,860; 7,070,802; 7,157,099; Constantinides et al., Pharmaceutical Research, 1994, 11, 1385; Ho et al., J. Pharm. Sci., 1996, 85, 138-143). Often microemulsions can form spontaneously when their components are brought together at ambient temperature. This can be particularly advantageous when formulating thermolabile drugs, peptides or RNAi agents. Microemulsions have also been effective in the transdermal delivery of active components in both cosmetic and pharmaceutical applications. It is expected that the microemulsion compositions and formulations of the present disclosure will facilitate the increased systemic absorption of RNAi agents and nucleic acids from the gastrointestinal tract, as well as improve the local cellular uptake of RNAi agents and nucleic acids.

[0640] Microemulsions of the present disclosure can also contain additional components and additives such as sorbitan monostearate (Grill 3), Labrasol, and penetration enhancers to improve the properties of the formulation and to enhance the absorption of the RNAi agents and nucleic acids of the present disclosure. Penetration enhancers used in the microemulsions of the present disclosure can be classified as belonging to one of five broad categories—surfactants, fatty acids, bile salts, chelating agents, and non-chelating non-surfactants (Lee et al., Critical Reviews in Therapeutic Drug Carrier Systems, 1991, p. 92). Each of these classes has been discussed above.

iii. Microparticles

[0641] An RNAi agent of the disclosure may be incorporated into a particle, e.g., a microparticle.

[0642] Microparticles can be produced by spray-drying, but may also be produced by other methods including lyophilization, evaporation, fluid bed drying, vacuum drying, or a combination of these techniques.

iv. Penetration Enhancers

[0643] In one embodiment, the present disclosure employs various penetration enhancers to effect the efficient delivery of nucleic acids, particularly RNAi agents, to the skin of animals. Most drugs are present in solution in both ionized and nonionized forms. However, usually only lipid soluble or lipophilic drugs readily cross cell membranes. It has been discovered that even non-lipophilic drugs can cross cell membranes if the membrane to be crossed is treated with a penetration enhancer. In addition to aiding the diffusion of non-lipophilic drugs across cell membranes, penetration enhancers also enhance the permeability of lipophilic drugs.

[0644] Penetration enhancers can be classified as belonging to one of five broad categories, i.e., surfactants, fatty acids, bile salts, chelating agents, and non-chelating non-surfactants (see e.g., Malmsten, M. Surfactants and polymers in drug delivery, Informa Health Care, New York, NY, 2002; Lee et al., Critical Reviews in Therapeutic Drug Carrier Systems, 1991, p. 92). Each of the above mentioned classes of penetration enhancers are described below in greater detail.

[0645] Surfactants (or “surface-active agents”) are chemical entities which, when dissolved in an aqueous solution, reduce the surface tension of the solution or the interfacial tension between the aqueous solution and another liquid, with the result that absorption of RNAi agents through the mucosa is enhanced. In addition to bile salts and fatty acids, these penetration enhancers include, for example, sodium lauryl sulfate, polyoxyethylene-9-lauryl ether and polyoxyethylene-20-cetyl ether) (see e.g., Malmsten, M. Surfactants and polymers in drug delivery, Informa Health Care, New York, NY, 2002; Lee et al., Critical Reviews in Therapeutic Drug Carrier Systems, 1991, p. 92); and perfluorochemical emulsions, such as FC-43. Takahashi et al., J. Pharm. Pharmacol., 1988, 40, 252).

[0646] Various fatty acids and their derivatives which act as penetration enhancers include, for example, oleic acid, lauric acid, capric acid (n-decanoic acid), myristic acid, palmitic acid, stearic acid, linoleic acid, linolenic acid, dicaprate, tricaprate, monoolein (1-monooleoyl-rac-glycerol), dilaurin, caprylic acid, arachidonic acid, glycerol 1-monocaprate, 1-dodecylazacycloheptan-2-one, acylcarnitines, acylcholines, C₁₋₂₀ alkyl esters thereof (e.g., methyl, isopropyl and t-butyl), and mono- and di-glycerides thereof (i.e., oleate, laurate, caprate, myristate, palmitate, stearate, linoleate, etc.) (see e.g., Touitou, E., et al. Enhancement in Drug Delivery, CRC Press, Danvers, M A, 2006; Lee et al., Critical Reviews in Therapeutic Drug Carrier Systems, 1991, p. 92; Muranishi, Critical Reviews in Therapeutic Drug Carrier Systems, 1990, 7, 1-33; El Hariri et al., J. Pharm. Pharmacol., 1992, 44, 651-654).

[0647] The physiological role of bile includes the facilitation of dispersion and absorption of lipids and fat-soluble vitamins (see e.g., Malmsten, M. Surfactants and polymers in drug delivery, Informa Health Care, New York, NY, 2002; Brunton, Chapter 38 in: Goodman & Gilman's The Pharmacological Basis of Therapeutics, 9th Ed., Hardman et al. Eds., McGraw-Hill, New York, 1996, pp. 934-935). Various natural bile salts, and their synthetic derivatives, act as penetration enhancers. Thus the term “bile salts” includes any of the naturally occurring components of bile as well as any of their synthetic derivatives. Suitable bile salts include, for example, cholic acid (or its pharmaceutically acceptable sodium salt, sodium cholate), dehydrocholic acid (sodium dehydrocholate), deoxycholic acid (sodium deoxycholate), glucholic acid (sodium glucholate), glycholic acid (sodium glycocholate), glycodeoxycholic acid (sodium glycodeoxycholate), taurocholic acid (sodium taurocholate), taurodeoxycholic acid (sodium taurodeoxycholate), chenodeoxycholic acid (sodium chenodeoxycholate), ursodeoxycholic acid (UDCA), sodium tauro-24,25-dihydro-fusidate (STDHF), sodium glycodihydrofusidate and polyoxyethylene-9-lauryl ether (POE) (see e.g., Malmsten, M. Surfactants and polymers in drug delivery, Informa Health Care, New York, NY, 2002; Lee et al., Critical Reviews in Therapeutic Drug Carrier Systems, 1991, page 92; Swinyard, Chapter 39 In: Remington's Pharmaceutical Sciences, 18th Ed., Gennaro, ed., Mack Publishing Co., Easton, Pa., 1990, pages 782-783; Muranishi, Critical Reviews in Therapeutic Drug Carrier Systems, 1990, 7, 1-33; Yamamoto et al., J. Pharm. Exp. Ther., 1992, 263, 25; Yamashita et al., J. Pharm. Sci., 1990, 79, 579-583).

[0648] Chelating agents, as used in connection with the present disclosure, can be defined as compounds that remove metallic ions from solution by forming complexes therewith, with the result that absorption of RNAi agents through the mucosa is enhanced. With regards to their use as penetration enhancers in the present disclosure, chelating agents have the added advantage of also serving as DNase inhibitors, as most characterized DNA nucleases require a divalent metal ion for catalysis and are thus inhibited by chelating agents (Jarrett, J. Chromatogr., 1993, 618, 315-339). Suitable chelating agents include but are not limited to disodium ethylenediaminetetraacetate (EDTA), citric acid, salicylates (e.g., sodium salicylate, 5-methoxysalicylate and homovanilate), N-acyl derivatives of collagen, laureth-9 and N-amino acyl derivatives of beta-diketones (enamines)(see e.g., Katdare, A. et al., Excipient development for pharmaceutical, biotechnology, and drug delivery, CRC Press, Danvers, M A, 2006; Lee et al., Critical Reviews in Therapeutic Drug Carrier Systems, 1991, page 92; Muranishi, Critical Reviews in Therapeutic Drug Carrier Systems, 1990, 7, 1-33; Buur et al., J. Control Rel., 1990, 14, 43-51).

[0649] As used herein, non-chelating non-surfactant penetration enhancing compounds can be defined as compounds that demonstrate insignificant activity as chelating agents or as surfactants but that nonetheless enhance absorption of RNAi agents through the alimentary mucosa (see e.g., Muranishi, Critical Reviews in Therapeutic Drug Carrier Systems, 1990, 7, 1-33). This class of penetration enhancers includes, for example, unsaturated cyclic ureas, 1-alkyl- and 1-alkenylazacyclo-alkanone derivatives (Lee et al., Critical Reviews in Therapeutic Drug Carrier Systems, 1991, page 92); and non-steroidal anti-inflammatory agents such as diclofenac sodium, indomethacin and phenylbutazone (Yamashita et al., J. Pharm. Pharmacol., 1987, 39, 621-626).

[0650] Agents that enhance uptake of RNAi agents at the cellular level can also be added to the pharmaceutical and other compositions of the present disclosure. For example, cationic lipids, such as lipofectin (Junichi et al, U.S. Pat. No. 5,705,188), cationic glycerol derivatives, and polycationic molecules, such as polylysine (WO 97/30731), are also known to enhance the cellular uptake of dsRNAs.

[0651] Other agents can be utilized to enhance the penetration of the administered nucleic acids, including glycols such as ethylene glycol and propylene glycol, pyrrols such as 2-pyrrol, azones, and terpenes such as limonene and menthone.

v. Excipients

[0652] In contrast to a carrier compound, a “pharmaceutical carrier” or “excipient” is a pharmaceutically acceptable solvent, suspending agent or any other pharmacologically inert vehicle for delivering one or more nucleic acids to an animal. The excipient can be liquid or solid and is selected, with the planned manner of administration in mind, so as to provide for the desired bulk, consistency, etc., when combined with a nucleic acid and the other components of a given pharmaceutical composition. Typical pharmaceutical carriers include, but are not limited to, binding agents (e.g., pregelatinized maize starch, polyvinylpyrrolidone or hydroxypropyl methylcellulose, etc.); fillers (e.g., lactose and other sugars, microcrystalline cellulose, pectin, gelatin, calcium sulfate, ethyl cellulose, polyacrylates or calcium hydrogen phosphate, etc.); lubricants (e.g., magnesium stearate, talc, silica, colloidal silicon dioxide, stearic acid, metallic stearates, hydrogenated vegetable oils, corn starch, polyethylene glycols, sodium benzoate, sodium acetate, etc.); disintegrants (e.g., starch, sodium starch glycolate, etc.); and wetting agents (e.g., sodium lauryl sulphate, etc).

[0653] Pharmaceutically acceptable organic or inorganic excipients suitable for non-parenteral administration which do not deleteriously react with nucleic acids can also be used to formulate the compositions of the present disclosure. Suitable pharmaceutically acceptable carriers include, but are not limited to, water, salt solutions, alcohols, polyethylene glycols, gelatin, lactose, amylose, magnesium stearate, talc, silicic acid, viscous paraffin, hydroxymethylcellulose, polyvinylpyrrolidone and the like.

[0654] Formulations for topical administration of nucleic acids can include sterile and non-sterile aqueous solutions, non-aqueous solutions in common solvents such as alcohols, or solutions of the nucleic acids in liquid or solid oil bases. The solutions can also contain buffers, diluents and other suitable additives.

[0655] Pharmaceutically acceptable organic or inorganic excipients suitable for non-parenteral administration which do not deleteriously react with nucleic acids can be used.

[0656] Suitable pharmaceutically acceptable excipients include, but are not limited to, water, salt solutions, alcohol, polyethylene glycols, gelatin, lactose, amylose, magnesium stearate, talc, silicic acid, viscous paraffin, hydroxymethylcellulose, polyvinylpyrrolidone and the like.

vi. Other Components

[0657] The compositions of the present disclosure can additionally contain other adjunct components conventionally found in pharmaceutical compositions, at their art-established usage levels. Thus, for example, the compositions can contain additional, compatible, pharmaceutically-active materials such as, for example, antipruritics, astringents, local anesthetics or anti-inflammatory agents, or can contain additional materials useful in physically formulating various dosage forms of the compositions of the present disclosure, such as dyes, flavoring agents, preservatives, antioxidants, opacifiers, thickening agents and stabilizers. However, such materials, when added, should not unduly interfere with the biological activities of the components of the compositions of the present disclosure. The formulations can be sterilized and, if desired, mixed with auxiliary agents, e.g., lubricants, preservatives, stabilizers, wetting agents, emulsifiers, salts for influencing osmotic pressure, buffers, colorings, flavorings or aromatic substances and the like which do not deleteriously interact with the nucleic acid(s) of the formulation.

[0658] Aqueous suspensions can contain substances which increase the viscosity of the suspension including, for example, sodium carboxymethylcellulose, sorbitol or dextran. The suspension can also contain stabilizers.

[0659] In some embodiments, pharmaceutical compositions featured in the disclosure include (a) one or more RNAi agents and (b) one or more agents which function by a non-RNAi mechanism and which are useful in treating a LRRK2-associated disorder. Examples of such agents include, but are not limited to, monoamine inhibitors, reserpine, anticonvulsants, antipsychotic agents, and antidepressants.

[0660] Toxicity and therapeutic efficacy of such compounds can be determined by standard pharmaceutical procedures in cell cultures or experimental animals, e.g., for determining the LD₅₀ (the dose lethal to 50% of the population) and the ED₅₀ (the dose therapeutically effective in 50% of the population). The dose ratio between toxic and therapeutic effects is the therapeutic index and it can be expressed as the ratio LD₅₀/ED₅₀. Compounds that exhibit high therapeutic indices are preferred.

[0661] The data obtained from cell culture assays and animal studies can be used in formulating a range of dosage for use in humans. The dosage of compositions featured herein in the disclosure lies generally within a range of circulating concentrations that include the ED₅₀ with little or no toxicity. The dosage can vary within this range depending upon the dosage form employed and the route of administration utilized. For any compound used in the methods featured in the disclosure, the therapeutically effective dose can be estimated initially from cell culture assays. A dose can be formulated in animal models to achieve a circulating plasma concentration range of the compound or, when appropriate, of the polypeptide product of a target sequence (e.g., achieving a decreased concentration of the polypeptide) that includes the IC₅₀ (i.e., the concentration of the test compound which achieves a half-maximal inhibition of symptoms) as determined in cell culture. Such information can be used to more accurately determine useful doses in humans. Levels in plasma can be measured, for example, by high performance liquid chromatography.

[0662] In addition to their administration, as discussed above, the RNAi agents featured in the disclosure can be administered in combination with other known agents effective in treatment of pathological processes mediated by nucleotide repeat expression. In any event, the administering physician can adjust the amount and timing of RNAi agent administration on the basis of results observed using standard measures of efficacy known in the art or described herein.

### VII. Kits

[0663] In certain aspects, the instant disclosure provides kits that include a suitable container containing a pharmaceutical formulation of a siRNA compound, e.g., a double-stranded siRNA compound, or ssiRNA compound, (e.g., a precursor, e.g., a larger siRNA compound which can be processed into a ssiRNA compound, or a DNA which encodes an siRNA compound, e.g., a double-stranded siRNA compound, or ssiRNA compound, or precursor thereof).

[0664] Such kits include one or more dsRNA agent(s) and instructions for use, e.g., instructions for administering a prophylactically or therapeutically effective amount of a dsRNA agent(s). The dsRNA agent may be in a vial or a pre-filled syringe. The kits may optionally further comprise means for administering the dsRNA agent (e.g., an injection device, such as a pre-filled syringe or an intrathecal pump), or means for measuring the inhibition of C3 (e.g., means for measuring the inhibition of LRRK2 mRNA, LRRK2 protein, and/or LRRK2 activity). Such means for measuring the inhibition of LRRK2 may comprise a means for obtaining a sample from a subject, such as, e.g., a CSF and/or plasma sample. The kits of the invention may optionally further comprise means for determining the therapeutically effective or prophylactically effective amount.

[0665] In certain embodiments the individual components of the pharmaceutical formulation may be provided in one container. Alternatively, it may be desirable to provide the components of the pharmaceutical formulation separately in two or more containers, e.g., one container for a siRNA compound preparation, and at least another for a carrier compound. The kit may be packaged in a number of different configurations such as one or more containers in a single box. The different components can be combined, e.g., according to instructions provided with the kit. The components can be combined according to a method described herein, e.g., to prepare and administer a pharmaceutical composition. The kit can also include a delivery device.

### VIII. Methods for Inhibiting LRRK2 Expression

[0666] The present disclosure also provides methods of inhibiting expression of a LRRK2 gene in a cell. The methods include contacting a cell with an RNAi agent, e.g., double stranded RNAi agent, in an amount effective to inhibit expression and/or activity of LRRK2 in the cell, thereby inhibiting expression and/or activity of LRRK2 in the cell. In certain embodiments of the disclosure, LRRK2 expression and/or activity is inhibited by at least 30% preferentially in CNS (e.g., brain) cells. In specific embodiments, LRRK2 expression and/or activity is inhibited by at least 30%. In other embodiments of the disclosure, LRRK2 expression and/or activity is inhibited preferentially by at least 30% in ocular (e.g., eye) cells. In certain other embodiments of the disclosure, LRRK2 expression and/or activity is inhibited by at least 30% preferentially in hepatocytes.

[0667] Contacting of a cell with an RNAi agent, e.g., a double stranded RNAi agent, may be done in vitro or in vivo. Contacting a cell in vivo with the RNAi agent includes contacting a cell or group of cells within a subject, e.g., a human subject, with the RNAi agent. Combinations of in vitro and in vivo methods of contacting a cell are also possible.

[0668] Contacting a cell may be direct or indirect, as discussed above. Furthermore, contacting a cell may be accomplished via a targeting ligand, including any ligand described herein or known in the art. In some embodiments, the targeting ligand is a carbohydrate moiety, e.g., a GalNAc ligand, or any other ligand that directs the RNAi agent to a site of interest.

[0669] The term “inhibiting,” as used herein, is used interchangeably with “reducing,” “silencing,” “downregulating,” “suppressing” and other similar terms, and includes any level of inhibition. In certain embodiments, a level of inhibition, e.g., for an RNAi agent of the instant disclosure, can be assessed in cell culture conditions, e.g., wherein cells in cell culture are transfected via Lipofectamine™-mediated transfection at a concentration in the vicinity of a cell of 10 nM or less, 1 nM or less, etc. Knockdown of a given RNAi agent can be determined via comparison of pre-treated levels in cell culture versus post-treated levels in cell culture, optionally also comparing against cells treated in parallel with a scrambled or other form of control RNAi agent. Knockdown in cell culture of, e.g., at least about 30%, can thereby be identified as indicative of “inhibiting” or “reducing”, “downregulating” or “suppressing”, etc. having occurred. It is expressly contemplated that assessment of targeted mRNA or encoded protein levels (and therefore an extent of “inhibiting”, etc. caused by an RNAi agent of the disclosure) can also be assessed in in vivo systems for the RNAi agents of the instant disclosure, under properly controlled conditions as described in the art.

[0670] The phrase “inhibiting LRRK2,” “inhibiting expression of a LRRK2 gene” or “inhibiting expression of LRRK2,” as used herein, includes inhibition of expression of any LRRK2 gene (such as, e.g., a mouse Lrrk2 gene, a rat LRRK2 gene, a monkey LRRK2 gene, or a human LRRK2 gene) as well as variants or mutants of a LRRK2 gene that encode a LRRK2 protein. Thus, the LRRK2 gene may be a wild-type LRRK2 gene, a mutant LRRK2 gene, or a transgenic LRRK2 gene in the context of a genetically manipulated cell, group of cells, or organism.

[0671] “Inhibiting expression of a LRRK2 gene” includes any level of inhibition of a LRRK2 gene, e.g., at least partial suppression of the expression of a LRRK2 gene, such as an inhibition by at least about 25%. In certain embodiments, inhibition is at least about 25%, at least about 30%, at least about 40%, at least about 50%, at least about 60%, at least about 70%, at least about 80%, at least about 90%, or at least about 95%, or at least about 99%, relative to a control level. LRRK2 inhibition can be measured using the in vitro assay with, e.g., A549 cells and a 10 nM concentration of the RNA agent and the PCR assay as provided in the examples herein, are contemplated to be within the scope of the present disclosure. In some embodiments, LRRK2 inhibition can be measured using the in vitro assay with human A549 cells. In some embodiments, LRRK2 inhibition can be measured using the in vitro assay with primary mouse hepatocytes. In another embodiment, LRRK2 inhibition can be measured using the in vitro assay with Cos-7 (Dual-Luciferase psiCHECK2 vector). In yet another embodiment, LRRK2 inhibition can be measured using the in vitro assay with BE(2)—C cells. In some embodiments, LRRK2 inhibition can be measured using the in vitro assay with Neuro-2a cells.

[0672] The expression of a LRRK2 gene may be assessed based on the level of any variable associated with LRRK2 gene expression, e.g., LRRK2 mRNA level (e.g., sense mRNA, antisense mRNA, total LRRK2 mRNA, sense LRRK2 repeat-containing mRNA, and/or antisense LRRK2 repeat-containing mRNA) or LRRK2 protein level (e.g., total LRRK2 protein, wild-type LRRK2 protein, or expanded repeat-containing protein), or, for example, the level of sense- or antisense-containing foci and/or the level of aberrant dipeptide repeat protein.

[0673] Inhibition may be assessed by a decrease in an absolute or relative level of one or more of these variables compared with a control level. The control level may be any type of control level that is utilized in the art, e.g., a pre-dose baseline level, or a level determined from a similar subject, cell, or sample that is untreated or treated with a control (such as, e.g., buffer only control or inactive agent control).

[0674] For example, in some embodiments of the methods of the disclosure, expression of a LRRK2 gene (e.g., as assessed by sense- or antisense-containing foci and/or aberrant dipeptide repeat protein level) is inhibited by at least 20%, 30%, 40%, 50%, 60%, 70%, 80%, 85%, 90%, or 95%, relative to a control level, or to below the level of detection of the assay. In other embodiments of the methods of the disclosure, expression of a LRRK2 gene (e.g., as assessed by mRNA or protein expression level) is inhibited by at least about 25%, at least about 30%, at least about 40%, at least about 50%, at least about 60%, at least about 70%, at least about 80%, at least about 90%, or at least about 95% relative to a control level. In certain embodiments, the methods include a clinically relevant inhibition of expression of LRRK2, e.g. as demonstrated by a clinically relevant outcome after treatment of a subject with an agent to reduce the expression of LRRK2.

[0675] Inhibition of the expression of a LRRK2 gene may be manifested by a reduction of the amount of mRNA expressed by a first cell or group of cells (such cells may be present, for example, in a sample derived from a subject) in which a LRRK2 gene is transcribed and which has or have been treated (e.g., by contacting the cell or cells with an RNAi agent of the disclosure, or by administering an RNAi agent of the disclosure to a subject in which the cells are or were present) such that the expression of a LRRK2 gene is inhibited, as compared to a second cell or group of cells substantially identical to the first cell or group of cells but which has not or have not been so treated (control cell(s) not treated with an RNAi agent or not treated with an RNAi agent targeted to the gene of interest). The degree of inhibition may be expressed in terms of

$$\frac{( mRNA in control cells ) - ( mRNA in treated cells )}{( mRNA in control cells )} \times 100 \%$$

[0676] In other embodiments, inhibition of the expression of a LRRK2 gene may be assessed in terms of a reduction of a parameter that is functionally linked to a LRRK2 gene expression, e.g., LRRK2 protein expression, sense- or antisense-containing foci and/or the level of aberrant dipeptide repeat protein. LRRK2 gene silencing may be determined in any cell expressing LRRK2, either endogenous or heterologous from an expression construct, and by any assay known in the art.

[0677] Inhibition of the expression of a LRRK2 protein may be manifested by a reduction in the level of the LRRK2 protein (or functional parameter, e.g., kinase and/or GTPase activity) that is expressed by a cell or group of cells (e.g., the level of protein expressed in a sample derived from a subject). As explained above, for the assessment of mRNA suppression, the inhibition of protein expression levels in a treated cell or group of cells may similarly be expressed as a percentage of the level of protein in a control cell or group of cells. In some embodiments, the phrase “inhibiting LRRK2”, can also refer to the inhibition of the kinase and/or GTPase activity of LRRK2, e.g., at least partial suppression of the LRRK2 kinase and/or GTPase activity, such as an inhibition by at least about 25%. In certain embodiments, inhibition of the LRRK2 kinase and/or GTPase activity is by at least about 25%, at least about 30%, at least about 40%, at least about 50%, at least about 60%, at least about 70%, at least about 80%, at least about 90%, or at least about 95%, or at least about 99% relative to a control level. LRRK2 kinase activity can be measured using the in vitro assay with, e.g., the assay described in (Smith et al. (2006) Nature Neuroscience 9(10):1231-3). LRRK2 GTPase activity can be measured using the in vitro assay with, e.g., the assay described in (Xiong et al. (2010) Plos Genet 6(4): e1000902).

[0678] A control cell or group of cells that may be used to assess the inhibition of the expression of a LRRK2 gene includes a cell or group of cells that has not yet been contacted with an RNAi agent of the disclosure. For example, the control cell or group of cells may be derived from an individual subject (e.g., a human or animal subject) prior to treatment of the subject with an RNAi agent.

[0679] The level of LRRK2 mRNA that is expressed by a cell or group of cells may be determined using any method known in the art for assessing mRNA expression. In one embodiment, the level of expression of LRRK2 in a sample is determined by detecting a transcribed polynucleotide, or portion thereof, e.g., mRNA of the LRRK2 gene. RNA may be extracted from cells using RNA extraction techniques including, for example, using acid phenol/guanidine isothiocyanate extraction (RNAzol B; Biogenesis), RNeasy™ RNA preparation kits (QiagenR) or PAXgene (PreAnalytix, Switzerland). Typical assay formats utilizing ribonucleic acid hybridization include nuclear run-on assays, RT-PCR, RNase protection assays, northern blotting, in situ hybridization, and microarray analysis. Strand specific LRRK2 mRNAs may be detected using the quantitative RT-PCR and or droplet digital PCR methods described in, for example, Jiang, et al. supra, Lagier-Tourenne, et al., supra and Jiang, et al., supra. Circulating LRRK2 mRNA may be detected using methods the described in WO2012/177906, the entire contents of which are hereby incorporated herein by reference.

[0680] In some embodiments, the level of expression of LRRK2 is determined using a nucleic acid probe. The term “probe”, as used herein, refers to any molecule that is capable of selectively binding to a specific LRRK2 nucleic acid or protein, or fragment thereof. Probes can be synthesized by one of skill in the art, or derived from appropriate biological preparations. Probes may be specifically designed to be labeled. Examples of molecules that can be utilized as probes include, but are not limited to, RNA, DNA, proteins, antibodies, and organic molecules.

[0681] Isolated mRNA can be used in hybridization or amplification assays that include, but are not limited to, Southern or northern analyses, polymerase chain reaction (PCR) analyses and probe arrays. One method for the determination of mRNA levels involves contacting the isolated mRNA with a nucleic acid molecule (probe) that can hybridize to LRRK2 mRNA. In one embodiment, the mRNA is immobilized on a solid surface and contacted with a probe, for example by running the isolated mRNA on an agarose gel and transferring the mRNA from the gel to a membrane, such as nitrocellulose. In an alternative embodiment, the probe(s) are immobilized on a solid surface and the mRNA is contacted with the probe(s), for example, in an Affymetrix® gene chip array. A skilled artisan can readily adapt known mRNA detection methods for use in determining the level of LRRK2 mRNA.

[0682] An alternative method for determining the level of expression of LRRK2 in a sample involves the process of nucleic acid amplification or reverse transcriptase (to prepare cDNA) of for example mRNA in the sample, e.g., by RT-PCR (the experimental embodiment set forth in Mullis, 1987, U.S. Pat. No. 4,683,202), ligase chain reaction (Barany (1991) Proc. Natl. Acad. Sci. USA 88:189-193), self sustained sequence replication (Guatelli et al. (1990) Proc. Natd. Acad. Sci. USA 87:1874-1878), transcriptional amplification system (Kwoh et al. (1989) Proc. Natd. Acad. Sci. USA 86:1173-1177), Q-Beta Replicase (Lizardi et al. (1988) Bio Technology 6:1197), rolling circle replication (Lizardi et al., U.S. Pat. No. 5,854,033) or any other nucleic acid amplification method, followed by the detection of the amplified molecules using techniques well known to those of skill in the art. These detection schemes are especially useful for the detection of nucleic acid molecules if such molecules are present in very low numbers. In particular aspects of the disclosure, the level of expression of LRRK2 is determined by quantitative fluorogenic RT-PCR (i.e., the TaqMan™ System), by a Dual-Glo® Luciferase assay, or by other art-recognized method for measurement of LRRK2 expression or mRNA level.

[0683] The expression level of LRRK2 mRNA may be monitored using a membrane blot (such as used in hybridization analysis such as northern, Southern, dot, and the like), or microwells, sample tubes, gels, beads or fibers (or any solid support comprising bound nucleic acids). See U.S. Pat. Nos. 5,770,722, 5,874,219, 5,744,305, 5,677,195 and 5,445,934, which are incorporated herein by reference. The determination of LRRK2 expression level may also comprise using nucleic acid probes in solution.

[0684] In some embodiments, the level of mRNA expression is assessed using branched DNA (bDNA) assays or real time PCR (qPCR). The use of this PCR method is described and exemplified in the Examples presented herein. Such methods can also be used for the detection of LRRK2 nucleic acids.

[0685] The level of LRRK2 protein expression may be determined using any method known in the art for the measurement of protein levels. Such methods include, for example, electrophoresis, capillary electrophoresis, high performance liquid chromatography (HPLC), thin layer chromatography (TLC), hyperdiffusion chromatography, fluid or gel precipitin reactions, absorption spectroscopy, a colorimetric assays, spectrophotometric assays, flow cytometry, immunodiffusion (single or double), immunoelectrophoresis, western blotting, radioimmunoassay (RIA), enzyme-linked immunosorbent assays (ELISAs), immunofluorescent assays, electrochemiluminescence assays, and the like. The level of LRRK protein expression can be measured by exosome extraction followed by either ELISA/MSD/SIMOA or LC-MS. Such assays can also be used for the detection of proteins indicative of the presence or replication of LRRK2 proteins.

[0686] The level of sense- or antisense-containing foci and the level of aberrant dipeptide repeat protein may be assessed using methods well-known to one of ordinary skill in the art, including, for example, fluorescent in situ hybridization (FISH), immunohistochemistry and immunoassay (see, e.g., Jiang, et al. supra).In some embodiments, the efficacy of the methods of the disclosure in the treatment of a LRRK2-associated disease is assessed by a decrease in LRRK2 mRNA level (e.g., by assessment of a CSF sample and/or plasma sample for LRRK2 level, by brain biopsy, or otherwise).

[0687] In some embodiments of the methods of the disclosure, the RNAi agent is administered to a subject such that the RNAi agent is delivered to a specific site within the subject. The inhibition of expression of LRRK2 may be assessed using measurements of the level or change in the level of LRRK2 mRNA (e.g., sense mRNA, antisense mRNA, total LRRK2 mRNA), LRRK2 protein (e.g., total LRRK2 protein, wild-type LRRK2 protein), sense-containing foci, antisense-containing foci, aberrant dipeptide repeat protein in a sample derived from a specific site within the subject, e.g., CNS cells or ocular cells. In certain embodiments, the methods include a clinically relevant inhibition of expression of LRRK2, e.g. as demonstrated by a clinically relevant outcome after treatment of a subject with an agent to reduce the expression of LRRK2, such as, for example, stabilization or inhibition of caudate atrophy (e.g., as assessed by volumetric MRI (vMRI)), a stabilization or reduction in neurofilament light chain (Nfl) levels in a CSF sample from a subject, a reduction in mutant LRRK2 mRNA or a cleaved mutant LRRK2 protein, e.g., full-length mutant LRRK2 mRNA or protein and a cleaved mutant LRRK2 mRNA or protein, and a stabilization or improvement in Unified LRRK2-associated disease Rating Scale (UHDRS) score.

[0688] As used herein, the terms detecting or determining a level of an analyte are understood to mean performing the steps to determine if a material, e.g., protein, RNA, is present. As used herein, methods of detecting or determining include detection or determination of an analyte level that is below the level of detection for the method used.

### IX. Methods of Treating or Preventing LRRK2-Associated Diseases

[0689] The present disclosure also provides methods of using an RNAi agent of the disclosure or a composition containing an RNAi agent of the disclosure to reduce or inhibit LRRK2 expression in a cell. The methods include contacting the cell with a dsRNA of the disclosure and maintaining the cell for a time sufficient to obtain degradation of the mRNA transcript of a LRRK2 gene, thereby inhibiting expression of the LRRK2 gene in the cell.

[0690] In addition, the present disclosure also provides methods of using an RNAi agent of the disclosure or a composition containing an RNAi agent of the disclosure to reduce the level and/or inhibit formation of sense- and antisense-containing foci in a cell. The methods include contacting the cell with a dsRNA of the disclosure, thereby reducing the level of the LRRK2 sense- and antisense-containing foci in the cell.

[0691] The present disclosure also provides methods of using an RNAi agent of the disclosure or a composition containing an RNAi agent of the disclosure to reduce the level and/or inhibit formation of aberrant dipeptide repeat protein in a cell. The methods include contacting the cell with a dsRNA of the disclosure, thereby reducing the level of the aberrant dipeptide repeat protein in the cell.

[0692] Reduction in gene expression, the level of LRRK2 sense- and antisense-containing foci, and/or aberrant dipeptide repeat protein can be assessed by any methods known in the art. For example, a reduction in the expression of LRRK2 may be determined by determining the mRNA expression level of LRRK2 using methods routine to one of ordinary skill in the art, e.g., northern blotting, qRT-PCR; by determining the protein level of LRRK2 using methods routine to one of ordinary skill in the art, such as western blotting, immunological techniques.

[0693] In the methods of the disclosure the cell may be contacted in vitro or in vivo, i.e., the cell may be within a subject.

[0694] A cell suitable for treatment using the methods of the disclosure may be any cell that expresses a LRRK2 gene. A cell suitable for use in the methods of the disclosure may be a mammalian cell, e.g., a primate cell (such as a human cell or a non-human primate cell, e.g., a monkey cell or a chimpanzee cell), a non-primate cell (such as a rat cell, or a mouse cell). In one embodiment, the cell is a human cell, e.g., a human CNS cell, or a human ocular cell.

[0695] LRRK2 expression (e.g., as assessed by sense mRNA, antisense mRNA, total LRRK2 mRNA, total LRRK2 protein) is inhibited in the cell by about 20%, 25%, 30%, 35%, 40%, 45%, or 50% relative to the expression in a control cell. In certain embodiments, LRRK2 expression is inhibited by at least about 50%, at least about 60%, at least about 70%, at least about 80%, at least about 90%, or at least about 95% relative to a control level.

[0696] Inhibition, as assessed by sense- or antisense-containing foci and/or aberrant dipeptide repeat protein level) is inhibited in the cell by at least 20%, 30%, 40%, preferably at least 50%, 60%, 70%, 80%, 85%, 90%, or 95%, or to below the level of detection of the assay.

[0697] The in vivo methods of the disclosure may include administering to a subject a composition containing an RNAi agent, where the RNAi agent includes a nucleotide sequence that is complementary to at least a part of an RNA transcript of the LRRK2 gene of the mammal to be treated. When the organism to be treated is a mammal such as a human, the composition can be administered by any means known in the art including, but not limited to oral, intraperitoneal, or parenteral routes, including intracranial (e.g., intraventricular, intraparenchymal, and intrathecal), intravenous, intramuscular, intravitreal, subcutaneous, transdermal, airway (aerosol), nasal, rectal, and topical (including buccal and sublingual) administration. In certain embodiments, the compositions are administered by intravenous infusion or injection. In certain embodiments, the compositions are administered by subcutaneous injection. In certain embodiments, the compositions are administered by intrathecal injection.

[0698] In some embodiments, the administration is via a depot injection. A depot injection may release the RNAi agent in a consistent way over a prolonged time period. Thus, a depot injection may reduce the frequency of dosing needed to obtain a desired effect, e.g., a desired inhibition of LRRK2, or a therapeutic or prophylactic effect. A depot injection may also provide more consistent serum concentrations. Depot injections may include subcutaneous injections or intramuscular injections. In preferred embodiments, the depot injection is a subcutaneous injection.

[0699] In some embodiments, the administration is via a pump. The pump may be an external pump or a surgically implanted pump. In certain embodiments, the pump is a subcutaneously implanted osmotic pump. In other embodiments, the pump is an infusion pump. An infusion pump may be used for intracranial, intravenous, subcutaneous, arterial, or epidural infusions. In preferred embodiments, the infusion pump is a subcutaneous infusion pump. In other embodiments, the pump is a surgically implanted pump that delivers the RNAi agent to the CNS.

[0700] The mode of administration may be chosen based upon whether local or systemic treatment is desired and based upon the area to be treated. The route and site of administration may be chosen to enhance targeting.

[0701] In one aspect, the present disclosure also provides methods for inhibiting the expression of a LRRK2 gene in a mammal. The methods include administering to the mammal a composition comprising a dsRNA that targets a LRRK2 gene in a cell of the mammal, thereby inhibiting expression of the LRRK2 gene in the cell. Reduction in gene expression can be assessed by any methods known it the art and by methods, e.g. qRT-PCR, described herein. Reduction in protein production can be assessed by any methods known it the art and by methods, e.g. ELISA, described herein. In one embodiment, a CNS biopsy sample or a cerebrospinal fluid (CSF) sample serves as the tissue material for monitoring the reduction in LRRK2 gene or protein expression (or of a proxy therefore).

[0702] The present disclosure further provides methods of treatment of a subject in need thereof. The treatment methods of the disclosure include administering an RNAi agent of the disclosure to a subject, e.g., a subject that would benefit from inhibition of LRRK2 expression, such as a subject having missense mutations in the LRRK2 gene, in a therapeutically effective amount of an RNAi agent targeting a LRRK2 gene or a pharmaceutical composition comprising an RNAi agent targeting a LRRK2 gene.

[0703] In addition, the present disclosure provides methods of preventing, treating or inhibiting the progression of a LRRK2-associated disease or disorder (e.g., a LRRK2-associated disorder), in a subject. The methods include administering to the subject a therapeutically effective amount of any of the RNAi agent, e.g., dsRNA agents, or the pharmaceutical composition provided herein, thereby preventing, treating or inhibiting the progression of a LRRK2-associated disease or disorder in the subject.

[0704] An RNAi agent of the disclosure may be administered as a “free RNAi agent.” A free RNAi agent is administered in the absence of a pharmaceutical composition. The naked RNAi agent may be in a suitable buffer solution. The buffer solution may comprise acetate, citrate, prolamine, carbonate, or phosphate, or any combination thereof. In one embodiment, the buffer solution is phosphate buffered saline (PBS). The pH and osmolarity of the buffer solution containing the RNAi agent can be adjusted such that it is suitable for administering to a subject.

[0705] Alternatively, an RNAi agent of the disclosure may be administered as a pharmaceutical composition, such as a dsRNA liposomal formulation.

[0706] Subjects that would benefit from a reduction or inhibition of LRRK2 gene expression are those having a LRRK2-associated disease, e.g., LRRK2-associated disease. Exemplary LRRK2-associated diseases include, but are not limited to, PD, Crohn's disease, immune disorders and ocular disorders.

[0707] The disclosure further provides methods for the use of an RNAi agent or a pharmaceutical composition thereof, e.g., for treating a subject that would benefit from reduction or inhibition of LRRK2 expression, e.g., a subject having a LRRK2-associated disorder, in combination with other pharmaceuticals or other therapeutic methods, e.g., with known pharmaceuticals or known therapeutic methods, such as, for example, those which are currently employed for treating these disorders. For example, in certain embodiments, an RNAi agent targeting LRRK2 is administered in combination with, e.g., an agent useful in treating a LRRK2-associated disorder as described elsewhere herein or as otherwise known in the art. For example, additional agents suitable for treating a subject that would benefit from reduction in LRRK2 expression, e.g., a subject having a LRRK2-associated disorder, may include agents currently used to treat symptoms of LRRK2-associated diseases. The RNAi agent and additional therapeutic agents may be administered at the same time or in the same combination, e.g., intrathecally, or the additional therapeutic agent can be administered as part of a separate composition or at separate times or by another method known in the art or described herein.

[0708] Exemplary additional therapeutics include, for example, a monoamine inhibitor, e.g., tetrabenazine (Xenazine), deutetrabenazine (Austedo), and reserpine, an anticonvulsant, e.g., valproic acid (Depakote, Depakene, Depacon), and clonazepam (Klonopin), an antipsychotic agent, e.g., risperidone (Risperdal), and haloperidol (Haldol), and an antidepressant, e.g., paroxetine (Paxil).

[0709] In one embodiment, the method includes administering a composition featured herein such that expression of the target LRRK2 gene is decreased, for at least one month. In preferred embodiments, expression is decreased for at least 2 months, 3 months, or 6 months.

[0710] Preferably, the RNAi agents useful for the methods and compositions featured herein specifically target RNAs (primary or processed) of the target LRRK2 gene. Compositions and methods for inhibiting the expression of these genes using RNAi agents can be prepared and performed as described herein.

[0711] Administration of the dsRNA according to the methods of the disclosure may result in a reduction of the severity, signs, symptoms, or markers of such diseases or disorders in a patient with a LRRK2-associated disorder. By “reduction” in this context is meant a statistically significant or clinically significant decrease in such level. The reduction can be, for example, at least about 5%, at least about 10%, at least about 15%, at least about 20%, at least about 25%, at least about 30%, at least about 35%, at least about 40%, at least about 45%, at least about 50%, at least about 55%, at least about 60%, at least about 65%, at least about 70%, at least about 75%, at least about 80%, at least about 85%, at least about 90%, at least about 95%, or about 100% relative to a control level.

[0712] Efficacy of treatment or prevention of disease can be assessed, for example by measuring disease progression, disease remission, symptom severity, reduction in pain, quality of life, dose of a medication required to sustain a treatment effect, level of a disease marker or any other measurable parameter appropriate for a given disease being treated or targeted for prevention. It is well within the ability of one skilled in the art to monitor efficacy of treatment or prevention by measuring any one of such parameters, or any combination of parameters. For example, efficacy of treatment of a LRRK2-associated disorder may be assessed, for example, by periodic monitoring of a subject's. Comparisons of the later readings with the initial readings provide a physician an indication of whether the treatment is effective. It is well within the ability of one skilled in the art to monitor efficacy of treatment or prevention by measuring any one of such parameters, or any combination of parameters. In connection with the administration of an RNAi agent targeting LRRK2 or pharmaceutical composition thereof, “effective against” a LRRK2-associated disorder indicates that administration in a clinically appropriate manner results in a beneficial effect for at least a statistically significant fraction of patients, such as an improvement of symptoms, a cure, a reduction in disease, extension of life, improvement in quality of life, or other effect generally recognized as positive by medical doctors familiar with treating LRRK2-associated disorders and the related causes.

[0713] A treatment or preventive effect is evident when there is a statistically significant improvement in one or more parameters of disease status, or by a failure to worsen or to develop symptoms where they would otherwise be anticipated. As an example, a favorable change of at least 10% in a measurable parameter of disease, and preferably at least 20%, 30%, 40%, 50% or more can be indicative of effective treatment. Efficacy for a given RNAi agent drug or formulation of that drug can also be judged using an experimental animal model for the given disease as known in the art. When using an experimental animal model, efficacy of treatment is evidenced when a statistically significant reduction in a marker or symptom is observed.

[0714] Alternatively, the efficacy can be measured by a reduction in the severity of disease as determined by one skilled in the art of diagnosis based on a clinically accepted disease severity grading scale. Any positive change resulting in e.g., lessening of severity of disease measured using the appropriate scale, represents adequate treatment using an RNAi agent or RNAi agent formulation as described herein.

[0715] In certain embodiments, subjects can be administered a therapeutic amount of dsRNA, such as about 0.01 mg/kg to about 200 mg/kg. In other embodiments, subjects can be administered a therapeutic amount of dsRNA, such as about 0.01 mg/kg to about 500 mg/kg. In yet other embodiments, subjects can be administered a therapeutic amount of dsRNA of about 500 mg/kg or more.

[0716] The RNAi agent can be administered intrathecally, via intravitreal injection, or by intravenous infusion over a period of time, on a regular basis. In certain embodiments, after an initial treatment regimen, the treatments can be administered on a less frequent basis. Administration of the RNAi agent can reduce LRRK2 levels, e.g., in a cell, tissue, blood, CSF sample or other compartment of the patient. In one embodiment, administration of the RNAi agent can reduce LRRK2 levels. e.g., in a cell, tissue, blood, CSF sample or other compartment of the patient by at least about 25%, such as about 25%, about 30%, about 40%, about 50%, about 60%, about 70%, about 80%, about 90%, or about 95% relative to a control level.

[0717] Before administration of a full dose of the RNAi agent, patients can be administered a smaller dose, such as a 5% infusion reaction, and monitored for adverse effects, such as an allergic reaction. In another example, the patient can be monitored for unwanted immunostimulatory effects, such as increased cytokine (e.g., TNF-alpha or INF-alpha) levels.

[0718] Alternatively, the RNAi agent can be administered subcutaneously, i.e., by subcutaneous injection. One or more injections may be used to deliver the desired, e.g., monthly dose of RNAi agent to a subject. The injections may be repeated over a period of time. The administration may be repeated on a regular basis. In certain embodiments, after an initial treatment regimen, the treatments can be administered on a less frequent basis. A repeat-dose regimen may include administration of a therapeutic amount of RNAi agent on a regular basis, such as monthly or extending to once a quarter, twice per year, once per year. In certain embodiments, the RNAi agent is administered about once per month to about once per quarter (i.e., about once every three months).

[0719] Unless otherwise defined, all technical and scientific terms used herein have the same meaning as commonly understood by one of ordinary skill in the art to which this invention belongs. Although methods and materials similar or equivalent to those described herein can be used in the practice or testing of the RNAi agents and methods featured in the invention, suitable methods and materials are described below. All publications, patent applications, patents, and other references mentioned herein are incorporated by reference in their entirety. In case of conflict, the present specification, including definitions, will control. In addition, the materials, methods, and examples are illustrative only and not intended to be limiting.

[0720] An informal Sequence Listing is filed herewith and forms part of the specification as filed.

### Examples

### Example 1. RNAi Agent Design, Synthesis, Selection, and In Vitro Evaluation

### Source of Reagents

[0721] Where the source of a reagent is not specifically given herein, such reagent can be obtained from any supplier of reagents for molecular biology at a quality/purity standard for application in molecular biology.

### Boinformatics

[0722] siRNAs targeting the human LRRK2 transcript (Homo sapiens leucine rich repeat kinase 2 (LRRK2) mRNA, NCBI refseqD NG_011709.1; NCBI GeneID: 120892) were designed using custom Rand Python scripts. The human LRRK2 mRNA (NM_198578.4) has a length of 9239 bases. The human LRRK2 transcript variant X3 (XM_024448833.1) mRNA has a length of 7989 bases.

[0723] Detailed lists of the unmodified LRRK2 sense and antisense strand nucleotide sequences are shown in Tables 3, 4, and 6. Detailed lists of the modified LRRK2 sense and antisense strand nucleotide sequences are shown in Table 5 and 7. Tables 6 and 7 include LRRK2 sense and antisense strand nucleotide sequences for C16 ligand conjugation.

[0724] It is to be understood that, throughout the application, a duplex name without a decimal is equivalent to a duplex name with a decimal which merely references the batch number of the duplex. For example, AD-1631035 is equivalent to AD-1631035.1.

TABLE 2
Abbreviations of nucleotide monomers used in nucleic acid sequence representation
It will be understood that these monomers, when present in an oligonucleotide, are mutually linked by 5′-3′-
phosphodiester bonds; and it is understood that when the nucleotide contains a 2′-fluoro modification, then
the fluoro replaces the hydroxy at that position of the parent nucleotide (i.e., it is a 2′-deoxy-2′-
fluoronucleotide).

| Abbreviation | Nucleotide(s) |
|---|---|
| A | Adenosine-3′-phosphate |
| Ab | beta-L-adenosine-3′-phosphate |
| Abs | beta-L-adenosine-3′-phosphorothioate |
| Af | 2′-fluoroadenosine-3′-phosphate |
| Afs | 2′-fluoroadenosine-3′-phosphorothioate |
| As | adenosine-3′-phosphorothioate |
| C | cytidine-3′-phosphate |
| Cb | beta-L-cytidine-3′-phosphate |
| Cbs | beta-L-cytidine-3′-phosphorothioate |
| Cf | 2′-fluorocytidine-3′-phosphate |
| Cfs | 2′-fluorocytidine-3′-phosphorothioate |
| Cs | cytidine-3′-phosphorothioate |
| G | guanosine-3′-phosphate |
| Gb | beta-L-guanosine-3′-phosphate |
| Gbs | beta-L-guanosine-3′-phosphorothioate |
| Gf | 2′-fluoroguanosine-3′-phosphate |
| Gfs | 2′-fluoroguanosine-3′-phosphorothioate |
| Gs | guanosine-3′-phosphorothioate |
| T | 5′-methyluridine-3′-phosphate |
| Tf | 2′-fluoro-5-methyluridine-3′-phosphate |
| Tfs | 2′-fluoro-5-methyluridine-3′-phosphorothioate |
| Ts | 5-methyluridine-3′-phosphorothioate |
| U | Uridine-3′-phosphate |
| Uf | 2′-fluorouridine-3′-phosphate |
| Ufs | 2′-fluorouridine-3′-phosphorothioate |
| Us | uridine-3′-phosphorothioate |
| N | anynucleotide,modifiedorunmodified |
| a | 2′-O-methyladenosine-3′-phosphate |
| as | 2′-O-methyladenosine-3′-phosphorothioate |
| C | 2′-O-methylcytidine-3′-phosphate |
| CS | 2′-O-methylcytidine-3′-phosphorothioate |
| g | 2′-O-methylguanosine-3′-phosphate |
| gs | 2′-O-methylguanosine-3′-phosphorothioate |
| t | 2′-O-methyl-5-methyluridine-3′-phosphate |
| ts | 2′-O-methyl-5-methyluridine-3′-phosphorothioate |
| u | 2′-O-methyluridine-3′-phosphate |
| us | 2′-O-methyluridine-3′-phosphorothioate |
| S | phosphorothioatelinkage |
| L96 | N-[tris(GalNAc-alkyl)-amido-dodecanoyl)]-4-hydroxyprolinol |
| | [Hyp-(GalNAc-alkyl)₃] |
| | [chemical structure] |
| (A2p) | Adenosine-2′-phosphate |
| (A2ps) | Adenosine-2′-phosphorothioate |
| (C2p) | Cytidine-2′-phosphate |
| (C2ps) | Cytidine-2′-phosphorothioate |
| (G2p) | Guanosine-2′-phosphate |
| (G2ps) | Guanosine-2′-phosphorothioate |
| (T2p) | Thymidine2′-phosphate |
| (T2ps) | Thymidine2′-phosphorothioate |
| (U2p) | Uridine-2′-phosphate |
| (U2ps) | uridine-2′-phosphorothioate |
| (Agn) | Adenosine-glycolnucleicacid(GNA) |
| (Cgn) | Cytidine-glycolnucleicacid(GNA) |
| (Ggn) | Guanosine-glycolnucleicacid(GNA) |
| (Tgn) | Thymidine-glycolnucleicacid(GNA)S-Isomer |
| P | Phosphate |
| VP | Vinyl-phosphonate |
| dA | 2′-deoxyadenosine-3′-phosphate |
| dAs | 2′-deoxyadenosine-3′-phosphorothioate |
| dC | 2′-deoxycytidine-3′-phosphate |
| dCs | 2′-deoxycytidine-3′-phosphorothioate |
| dG | 2′-deoxyguanosine-3′-phosphate |
| dGs | 2′-deoxyguanosine-3′-phosphorothioate |
| dT | 2′-deoxythymidine-3-phosphate |
| dTs | 2′-deoxythymidine-3′-phosphorothioate |
| dU | 2′-deoxyuridine |
| dUs | 2′-deoxyuridine-3′-phosphorothioate |
| (Ahd) | 2′-O-hexadecyl-adenosine-3′-phosphate |
| (Ahds) | 2′-O-hexadecyl-adenosine-3′-phosphorothioate |
| (Chd) | 2′-O-hexadecyl-cytidine-3′-phosphate |
| (Chds) | 2′-O-hexadecyl-cytidine-3′-phosphorothioate |
| (Ghd) | 2′-O-hexadecyl-guanosine-3′-phosphate |
| (Ghds) | 2′-O-hexadecyl-guanosine-3′-phosphorothioate |
| (Uhd) | 2′-O-hexadecyl-uridine-3′-phosphate |
| (Uhds) | 2′-O-hexadecyl-uridine-3′-phosphorothioate |

TABLE 3
Unmodified Sense and Antisense Strand Sequences of Human LRRK2 dsRNA Agents

| | Sense | SEQ | Range in | Range in | Antisense | SEQ | Range in | Range in |
|---|---|---|---|---|---|---|---|---|
| Duplex | Sequence | ID | XM_ | NM_ | Sequence | ID | XM_ | NM_ |
| ID | 5′ to 3′ | NO: | 024448833.1 | 198578.4 | 5′ to 3′ | NO: | 024448833.1 | 198578.4 |
| AD- | ACACCUGAAUGU | 11 | 212-232 | 1458-1478 | UACUCCAAAACAU | 167 | 210-232 | 1456-1478 |
| 1624152 | UUUGGAGUA | | | | UCAGGUGUAU | | | |
| AD- | AGAAGCAUAUA | 12 | 238-258 | 1484-1504 | UAGGAGAAUGUA | 168 | 236-258 | 1482-1504 |
| 1624178 | CAUUCUCCUA | | | | UAUGCUUCUGC | | | |
| AD- | UCACAAACUGGU | 13 | 515-535 | 1761-1781 | UCUGCUAGGACCA | 169 | 513-535 | 1759-1781 |
| 1624412 | CCUAGCAGA | | | | GUUUGUGAAU | | | |
| AD- | GGGUUUAAGUC | 14 | 704-724 | 1950-1970 | UAUCCUAUAAGAC | 170 | 702-724 | 1948-1970 |
| 1624595 | UUAUAGGAUA | | | | UUAAACCCAG | | | |
| AD- | AGGAUUUCAGA | 15 | 830-850 | 2076-2096 | UCUAAGAUUGUCU | 171 | 828-850 | 2074-2096 |
| 1624721 | CAAUCUUAGA | | | | GAAAUCCUUU | | | |
| AD- | AGCAAUCCUCAA | 16 | 848-868 | 2094-2114 | UCUGACAAUUUGA | 172 | 846-868 | 2092-2114 |
| 1624739 | AUUGUCAGA | | | | GGAUUGCUAA | | | |
| AD- | AACCUCUGUUGC | 17 | 966-986 | 2212-2232 | UAAACACUUGCAA | 173 | 964-986 | 2210-2232 |
| 1624856 | AAGUGUUUA | | | | CAGAGGUUUA | | | |
| AD- | ACCUCUGUUGCA | 18 | 967-987 | 2213-2233 | UAAAACACUUGCA | 174 | 965-987 | 2211-2233 |
| 1624857 | AGUGUUUUA | | | | ACAGAGGUUU | | | |
| AD- | GAUGCUAGAGA | 19 | 1022-1042 | 2268-2288 | UCACACGCUCUCU | 175 | 1020-1042 | 2266-2288 |
| 1624894 | GAGCGUGUGA | | | | CUAGCAUCAC | | | |
| AD- | UCUCGUGAACAA | 20 | 1185-1205 | 2431-2451 | UCGUACAUCUUGU | 176 | 1183-1205 | 2429-2451 |
| 1625057 | GAUGUACGA | | | | UCACGAGAUC | | | |
| AD- | GGCCAACAAUAG | 21 | 1283-1303 | 2529-2549 | UGGCAAAUGCUAU | 177 | 1281-1303 | 2527-2549 |
| 1625155 | CAUUUGCCA | | | | UGUUGGCCAC | | | |
| AD- | AGGAAAAGUUG | 22 | 1319-1339 | 2565-2585 | UAAGAAGGUUCAA | 178 | 1317-1339 | 2563-2585 |
| 1625191 | AACCUUCUUA | | | | CUUUUCCUAU | | | |
| AD- | GGAAAAGUUGA | 23 | 1320-1340 | 2566-2586 | UCAAGAAGGUUCA | 179 | 1318-1340 | 2564-2586 |
| 1625192 | ACCUUCUUGA | | | | ACUUUUCCUA | | | |
| AD- | AAAGUUGAACC | 24 | 1323-1343 | 2569-2589 | UAGCCAAGAAGGU | 180 | 1321-1343 | 2567-2589 |
| 1625195 | UUCUUGGCUA | | | | UCAACUUUUC | | | |
| AD- | UUGGCUUGGUCC | 25 | 1337-1357 | 2583-2603 | UGAAAUAAAGGAC | 181 | 1335-1357 | 2581-2603 |
| 1625209 | UUUAUUUCA | | | | CAAGCCAAGA | | | |
| AD- | GAUAAGACUUC | 26 | 1359-1379 | 2605-2625 | UCUUAAAUUAGAA | 182 | 1357-1379 | 2603-2625 |
| 1625230 | UAAUUUAAGA | | | | GUCUUAUCUG | | | |
| AD- | GAAUGGUGAUC | 27 | 1411-1431 | 2657-2677 | UCUGAUAUCUGAU | 183 | 1409-1431 | 2655-2677 |
| 1625282 | AGAUAUCAGA | | | | CACCAUUCUU | | | |
| AD- | UUUAUUCCUGAC | 28 | 1518-1538 | 2764-2784 | UAUAGAAGAGUCA | 184 | 1516-1538 | 2762-2784 |
| 1625389 | UCUUCUAUA | | | | GGAAUAAAGG | | | |
| AD- | UUAGUGUAGGA | 29 | 1621-1641 | 2867-2887 | UGUAAAAUUCUCC | 185 | 1619-1641 | 2865-2887 |
| 1625485 | GAAUUUUACA | | | | UACACUAAUU | | | |
| AD | UUUUACCGAGA | 30 | 1635-1655 | 2881-2901 | UAAUACGGCAUCU | 186 | 1633-1655 | 2879-2901 |
| 1625499 | UGCCGUAUUA | | | | CGGUAAAAUU | | | |
| AD- | UUACCGAGAUGC | 31 | 1637-1657 | 2883-2903 | UGUAAUACGGCAU | 187 | 1635-1657 | 2881-2903 |
| 1625501 | CGUAUUACA | | | | CUCGGUAAAA | | | |
| AD- | AAACUUCAAUCC | 32 | 1776-1796 | 3022-3042 | UCUCAUAUGGGAU | 188 | 1774-1796 | 3020-3042 |
| 1625610 | CAUAUGAGA | | | | UGAAGUUUUG | | | |
| AD- | UGCACUCACGAG | 33 | 1952-1972 | 3198-3218 | UGUGGAAAGCUCG | 189 | 1950-1972 | 3196-3218 |
| 1625786 | CUUUCCACA | | | | UGAGUGCAUU | | | |
| AD- | CUCUCGAAAUGA | 34 | 2084-2104 | 3330-3350 | UGUCCAAUGUCAU | 190 | 2082-2104 | 3328-3350 |
| 1625910 | CAUUGGACA | | | | UUCGAGAGAC | | | |
| AD- | ACCCUCAGUGGU | 35 | 2102-2122 | 3348-3368 | UGAUCUAAAACCA | 191 | 2100-2122 | 3346-3368 |
| 1625928 | UUUAGAUCA | | | | CUGAGGGUCC | | | |
| AD- | AGUUUAACCUG | 36 | 2149-2169 | 3395-3415 | UGUUAUAUGACAG | 192 | 2147-2169 | 3393-3415 |
| 1625975 | UCAUAUAACA | | | | GUUAAACUGU | | | |
| AD- | UUGCUGCUAUGC | 37 | 2383-2403 | 3629-3649 | UCAAGAAAGGCAU | 193 | 2381-2403 | 3627-3649 |
| 1626183 | CUUUCUUGA | | | | AGCAGCAAGA | | | |
| AD- | UGCUGCUAUGCC | 38 | 2384-2404 | 3630-3650 | UGCAAGAAAGGCA | 194 | 2382-2404 | 3628-3650 |
| 1626184 | UUUCUUGCA | | | | UAGCAGCAAG | | | |
| AD- | UUAAAUCUUCCA | 39 | 2466-2486 | 3712-3732 | UCGCAAGUGUGGA | 195 | 2464-2486 | 3710-3732 |
| 1626265 | CACUUGCGA | | | | AGAUUUAAAA | | | |
| AD- | UAAAUCUUCCAC | 40 | 2467-2487 | 3713-3733 | UCCGCAAGUGUGG | 196 | 2465-2487 | 3711-3733 |
| 1626266 | ACUUGCGGA | | | | AAGAUUUAAA | | | |
| AD- | AAUCUUCCACAC | 41 | 2469-2489 | 3715-3735 | UGACCGCAAGUGU | 197 | 2467-2489 | 3713-3735 |
| 1626268 | UUGCGGUCA | | | | GGAAGAUUUA | | | |
| AD- | UCUUCCACACUU | 42 | 2471-2491 | 3717-3737 | UAAGACCGCAAGU | 198 | 2469-2491 | 3715-3737 |
| 1626270 | GCGGUCUUA | | | | GUGGAAGAUU | | | |
| AD- | UCCACACUUGCG | 43 | 2474-2494 | 3720-3740 | UCUAAAGACCGCA | 199 | 2472-2494 | 3718-3740 |
| 1626273 | GUCUUUAGA | | | | AGUGUGGAAG | | | |
| AD- | UUGCGGUCUUU | 44 | 2481-2501 | 3727-3747 | UCUCAUAUCUAAA | 200 | 2479-2501 | 3725-3747 |
| 1626280 | AGAUAUGAGA | | | | GACCGCAAGU | | | |
| AD- | AACUUAAGGGA | 45 | 2550-2570 | 3796-3816 | UAAUAAGAGUUCC | 201 | 2548-2570 | 3794-3816 |
| 1626349 | ACUCUUAUUA | | | | CUUAAGUUCA | | | |
| AD- | UAAGGGAACUC | 46 | 2554-2574 | 3800-3820 | UGCUAAAUAAGAG | 202 | 2552-2574 | 3798-3820 |
| 1626353 | UUAUUUAGCA | | | | UUCCCUUAAG | | | |
| AD- | UAAUCAGAUCA | 47 | 2576-2596 | 3822-3842 | UCCAAGAUGCUGA | 203 | 2574-2596 | 3820-3842 |
| 1626375 | GCAUCUUGGA | | | | UCUGAUUAUG | | | |
| AD- | AUCAGCAUCUUG | 48 | 2583-2603 | 3829-3849 | UCUCAAGUCCAAG | 204 | 2581-2603 | 3827-3849 |
| 1626382 | GACUUGAGA | | | | AUGCUGAUCU | | | |
| AD- | UAGAGAAACUG | 49 | 2629-2649 | 3875-3895 | UAGAAAGAUGCAG | 205 | 2627-2649 | 3873-3895 |
| 1626428 | CAUCUUUCUA | | | | UUUCUCUACU | | | |
| AD- | UGGAACUAAGA | 50 | 2725-2745 | 3971-3991 | UGGGAAAGGAUCU | 206 | 2723-2745 | 3969-3991 |
| 1626524 | UCCUUUCCCA | | | | UAGUUCCAAG | | | |
| AD- | AUAACCGAAUG | 51 | 2884-2904 | 4130-4150 | UCAUAAGUUUCAU | 207 | 2882-2904 | 4128-4150 |
| 1626636 | AAACUUAUGA | | | | UCGGUUAUAA | | | |
| AD- | CAAUAUAAAGG | 52 | 3197-3217 | 4443-4463 | UAAGCGCGAGCCU | 208 | 3195-3217 | 4441-4463 |
| 1626921 | CUCGCGCUUA | | | | UUAUAUUGAA | | | |
| AD- | AUAAAGGCUCGC | 53 | 3201-3221 | 4447-4467 | UGAAGAAGCGCGA | 209 | 3199-3221 | 4445-4467 |
| 1626925 | GCUUCUUCA | | | | GCCUUUAUAU | | | |
| AD- | AAAGGCUCGCGC | 54 | 3203-3223 | 4449-4469 | UAAGAAGAAGCGC | 210 | 3201-3223 | 4447-4469 |
| 1626927 | UUCUUCUUA | | | | GAGCCUUUAU | | | |
| AD- | UUCUCGUUGGCA | 55 | 3232-3252 | 4478-4498 | UCAAAUGUGUGCC | 211 | 3230-3252 | 4476-4498 |
| 1626936 | CACAUUUGA | | | | AACGAGAAUC | | | |
| AD- | CACACAUUUGGA | 56 | 3242-3262 | 4488-4508 | UCAGAAACAUCCA | 212 | 3240-3262 | 4486-4508 |
| 1626946 | UGUUUCUGA | | | | AAUGUGUGCC | | | |
| AD- | AUGCUUUGGCA | 57 | 3373-3393 | 4619-4639 | UCCGAAGUUUUGC | 213 | 3371-3393 | 4617-4639 |
| 1627077 | AAACUUCGGA | | | | CAAAGCAUCA | | | |
| AD- | ACGAGAGCCUUA | 58 | 3406-3426 | 4652-4672 | UCUUGAAAUUAAG | 214 | 3404-3426 | 4650-4672 |
| 1627110 | AUUUCAAGA | | | | GCUCUCGUUU | | | |
| AD- | AAUCAGGAGUCC | 59 | 3622-3642 | 4868-4888 | UAUGAAGAAGGAC | 215 | 3620-3642 | 4866-4888 |
| 1627308 | UUCUUCAUA | | | | UCCUGAUUCA | | | |
| AD- | AAUCAUGGCACA | 60 | 3704-3724 | 4950-4970 | UTCAAAAUCUGTG | 216 | 3702-3724 | 4948-4970 |
| 1627390 | GAUUUUGAA | | | | CCAUGAUUUU | | | |
| AD- | CAGUGAAAGUG | 61 | 3724-3744 | 4970-4990 | UACAACCUUCCAC | 217 | 3722-3744 | 4968-4990 |
| 1627410 | GAAGGUUGUA | | | | UUUCACUGUC | | | |
| AD- | AGUGAAAGUGG | 62 | 3725-3745 | 4971-4991 | UGACAACCUUCCA | 218 | 3723-3745 | 4969-4991 |
| 1627411 | AAGGUUGUCA | | | | CUUUCACUGU | | | |
| AD- | GUGAAAGUGGA | 63 | 3726-3746 | 4972-4992 | UGGACAACCUUCC | 219 | 3724-3746 | 4970-4992 |
| 1627412 | AGGUUGUCCA | | | | ACUUUCACUG | | | |
| AD- | CUAGAAAAAUU | 64 | 3846-3866 | 5092-5112 | UGCAAUCUGGAAU | 220 | 3844-3866 | 5090-5112 |
| 1627511 | CCAGAUUGCA | | | | UUUUCUAGGA | | | |
| AD- | AAUUAUCAUCCG | 65 | 3956-3976 | 5202-5222 | UCAUAUAGUCGGA | 221 | 3954-3976 | 5200-5222 |
| 1627601 | ACUAUAUGA | | | | UGAUAAUUUC | | | |
| AD- | GCCUUAUUUUCC | 66 | 3980-4000 | 5226-5246 | UAUCCCAUUGGAA | 222 | 3978-4000 | 5224-5246 |
| 1627625 | AAUGGGAUA | | | | AAUAAGGCAU | | | |
| AD- | UUUUCCAAUGG | 67 | 3986-4006 | 5232-5252 | UACCAAAAUCCCA | 223 | 3984-4006 | 5230-5252 |
| 1627631 | GAUUUUGGUA | | | | UUGGAAAAUA | | | |
| AD- | UUUCCAAUGGG | 68 | 3987-4007 | 5233-5253 | UGACCAAAAUCCC | 224 | 3985-4007 | 5231-5253 |
| 1627632 | AUUUUGGUCA | | | | AUUGGAAAAU | | | |
| AD- | UUGAGAUUUCA | 69 | 4027-4047 | 5273-5293 | UCAUGUAAGGUGA | 225 | 4025-4047 | 5271-5293 |
| 1627672 | CCUUACAUGA | | | | AAUCUCAAGU | | | |
| AD- | GCCCAAACAGAA | 70 | 4072-4092 | 5318-5338 | UCCAAUACAUUCU | 226 | 4070-4092 | 5316-5338 |
| 1627717 | UGUAUUGGA | | | | GUUUGGGCGA | | | |
| AD- | UGAAGCUUAUU | 71 | 4121-4141 | 5367-5387 | UCUACCAGACAAU | 227 | 4119-4141 | 5365-5387 |
| 1627766 | GUCUGGUAGA | | | | AAGCUUCAGG | | | |
| AD- | GAAGCUUAUUG | 72 | 4122-4142 | 5368-5388 | UCCUACCAGACAA | 228 | 4120-4142 | 5366-5388 |
| 1627767 | UCUGGUAGGA | | | | UAAGCUUCAG | | | |
| AD- | AGCUUAUUGUC | 73 | 4124-4144 | 5370-5390 | UAUCCUACCAGAC | 229 | 4122-4144 | 5368-5390 |
| 1627769 | UGGUAGGAUA | | | | AAUAAGCUUC | | | |
| AD- | UUAUUGUCUGG | 74 | 4127-4147 | 5373-5393 | UCAGAUCCUACCA | 230 | 4125-4147 | 5371-5393 |
| 1627772 | UAGGAUCUGA | | | | GACAAUAAGC | | | |
| AD- | AAAAUUACAGU | 75 | 4179-4199 | 5425-5445 | UCAAGAAGGAACU | 231 | 4177-4199 | 5423-5445 |
| 1627820 | UCCUUCUUGA | | | | GUAAUUUUUA | | | |
| AD- | UGUAGAAAAGG | 76 | 4197-4217 | 5443-5463 | UAGAAUACAGCCU | 232 | 4195-4217 | 5441-5463 |
| 1627838 | CUGUAUUCUA | | | | UUUCUACAAG | | | |
| AD- | UAUUCUUUUGG | 77 | 4211-4231 | 5457-5477 | UCAACUTGGCCCA | 233 | 4209-4231 | 5455-5477 |
| 1627852 | GCCAAGUUGA | | | | AAAGAAUACA | | | |
| AD- | CUUUUGGGCCAA | 78 | 4215-4235 | 5461-5481 | UTCCACAACUUGG | 234 | 4213-4235 | 5459-5481 |
| 1627856 | GUUGUGGAA | | | | CCCAAAAGAA | | | |
| AD- | AAGUUGUGGAC | 79 | 4225-4245 | 5471-5491 | UAUCAATGUGGTC | 235 | 4223-4245 | 5469-5491 |
| 1627866 | CACAUUGAUA | | | | CACAACUUGG | | | |
| AD- | UGUGGACCACAU | 80 | 4229-4249 | 5475-5495 | UGAGAATCAAUGU | 236 | 4227-4249 | 5473-5495 |
| 1627870 | UGAUUCUCA | | | | GGUCCACAAC | | | |
| AD- | AAGAAUGGUUU | 81 | 4255-4275 | 5501-5521 | UCAACCCAGGAAA | 237 | 4253-4275 | 5499-5521 |
| 1627896 | CCUGGGUUGA | | | | CCAUUCUUCC | | | |
| AD- | UUGAAGAAAUG | 82 | 4311-4331 | 5557-5577 | UTAUAATGCCCAU | 238 | 4309-4331 | 5555-5577 |
| 1627952 | GGCAUUAUAA | | | | UUCUUCAACA | | | |
| AD- | GGAAGGAGAUC | 83 | 4394-4414 | 5640-5660 | UTUACUAAGAGAU | 239 | 4392-4414 | 5638-5660 |
| 1628008 | UCUUAGUAAA | | | | CUCCUUCCUC | | | |
| AD- | AGAUCUCUUAG | 84 | 4400-4420 | 5646-5666 | UCUGGATUUACTA | 240 | 4398-4420 | 5644-5666 |
| 1628014 | UAAAUCCAGA | | | | AGAGAUCUCC | | | |
| AD- | AAUCCAGAUCAA | 85 | 4413-4433 | 5659-5679 | UAGCCUTGGUUGA | 241 | 4411-4433 | 5657-5679 |
| 1628027 | CCAAGGCUA | | | | UCUGGAUUUA | | | |
| AD- | AGGCUCACCAUU | 86 | 4428-4448 | 5674-5694 | UGAUAUTGGAATG | 242 | 4426-4448 | 5672-5694 |
| 1628042 | CCAAUAUCA | | | | GUGAGCCUUG | | | |
| AD- | GGCUCACCAUUC | 87 | 4429-4449 | 5675-5695 | UAGATATUGGAAU | 243 | 4427-4449 | 5673-5695 |
| 1628043 | CAAUAUCUA | | | | GGUGAGCCUU | | | |
| AD- | GCUCACCAUUCC | 88 | 4430-4450 | 5676-5696 | UGAGAUAUUGGA | 244 | 4428-4450 | 5674-5696 |
| 1628044 | AAUAUCUCA | | | | AUGGUGAGCCU | | | |
| AD- | CAUUCCAAUAUC | 89 | 4436-4456 | 5682-5702 | UCAATCTGAGATA | 245 | 4434-4456 | 5680-5702 |
| 1628050 | UCAGAUUGA | | | | UUGGAAUGGU | | | |
| AD- | UUCCAAUAUCUC | 90 | 4438-4458 | 5684-5704 | UGGCAATCUGAGA | 246 | 4436-4458 | 5682-5704 |
| 1628052 | AGAUUGCCA | | | | UAUUGGAAUG | | | |
| AD- | GACCUGCCUAGA | 91 | 4476-4496 | 5722-5742 | UAUAAUAUUUCTA | 247 | 4474-4496 | 5720-5742 |
| 1628070 | AAUAUUAUA | | | | GGCAGGUCAG | | | |
| AD- | CUGCCUAGAAAU | 92 | 4479-4499 | 5725-5745 | UAACAUAAUAUTU | 248 | 4477-4499 | 5723-5745 |
| 1628073 | AUUAUGUUA | | | | CUAGGCAGGU | | | |
| AD- | AGAGUUUCUCCU | 93 | 4532-4552 | 5778-5798 | UCAUCACCUAGGA | 249 | 4530-4552 | 5776-5798 |
| 1628118 | AGGUGAUGA | | | | GAAACUCUGG | | | |
| AD- | GAGUUUCUCCUA | 94 | 4533-4553 | 5779-5799 | UCCATCACCUAGG | 250 | 4531-4553 | 5777-5799 |
| 1628119 | GGUGAUGGA | | | | AGAAACUCUG | | | |
| AD- | UGAUGGCAGUU | 95 | 4547-4567 | 5793-5813 | UCUGAUCCAAAAC | 251 | 4545-4567 | 5791-5813 |
| 1628133 | UUGGAUCAGA | | | | UGCCAUCACC | | | |
| AD- | GAUGUUGGUGA | 96 | 4718-4738 | 5964-5984 | UCUAACTCCAUCA | 252 | 4716-4738 | 5962-5984 |
| 1628253 | UGGAGUUAGA | | | | CCAACAUCCG | | | |
| AD- | AUGUUGGUGAU | 97 | 4719-4739 | 5965-5985 | UGCUAACUCCATC | 253 | 4717-4739 | 5963-5985 |
| 1628254 | GGAGUUAGCA | | | | ACCAACAUCC | | | |
| AD- | CCUCCAAGGGUU | 98 | 4738-4758 | 5984-6004 | UAUCCAAGGAACC | 254 | 4736-4758 | 5982-6004 |
| 1628273 | CCUUGGAUA | | | | CUUGGAGGCU | | | |
| AD- | GCCUCACUAGAA | 99 | 4783-4803 | 6029-6049 | UCUGTAGGGUUCU | 255 | 4781-4803 | 6027-6049 |
| 1628318 | CCCUACAGA | | | | AGUGAGGCUG | | | |
| AD- | ACUCAGCCAUGA | 100 | 4846-4866 | 6092-6112 | UGUATATAAUCAU | 256 | 4844-4866 | 6090-6112 |
| 1628381 | UUAUAUACA | | | | GGCUGAGUGG | | | |
| AD- | CUCAGCCAUGAU | 101 | 4847-4867 | 6093-6113 | UGGUAUAUAAUCA | 257 | 4845-4867 | 6091-6113 |
| 1628382 | UAUAUACCA | | | | UGGCUGAGUG | | | |
| AD- | UCAGCCAUGAUU | 102 | 4848-4868 | 6094-6114 | UCGGTATAUAATC | 258 | 4846-4868 | 6092-6114 |
| 1628383 | AUAUACCGA | | | | AUGGCUGAGU | | | |
| AD- | AGCCAUGAUUA | 103 | 4850-4870 | 6096-6116 | UCUCGGTAUAUAA | 259 | 4848-4870 | 6094-6116 |
| 1628385 | UAUACCGAGA | | | | UCAUGGCUGA | | | |
| AD- | CACAAUGUGCUG | 104 | 4881-4901 | 6127-6147 | UGUGAAAAGCAGC | 260 | 4879-4901 | 6125-6147 |
| 1628396 | CUUUUCACA | | | | ACAUUGUGGG | | | |
| AD- | UCACACUGUAUC | 105 | 4897-4917 | 6143-6163 | UAGCAUTGGGATA | 261 | 4895-4917 | 6141-6163 |
| 1628412 | CCAAUGCUA | | | | CAGUGUGAAA | | | |
| AD- | CAUCAUUGCAAA | 106 | 4919-4939 | 6165-6185 | UCAGCAAUCUUTG | 262 | 4917-4939 | 6163-6185 |
| 1628434 | GAUUGCUGA | | | | CAAUGAUGGC | | | |
| AD- | GCAAAGAUUGC | 107 | 4926-4946 | 6172-6192 | UCCGTAGUCAGCA | 263 | 4924-4946 | 6170-6192 |
| 1628441 | UGACUACGGA | | | | AUCUUUGCAA | | | |
| AD- | CAAAGAUUGCU | 108 | 4927-4947 | 6173-6193 | UGCCGUAGUCAGC | 264 | 4925-4947 | 6171-6193 |
| 1628442 | GACUACGGCA | | | | AAUCUUUGCA | | | |
| AD- | AAAGAUUGCUG | 109 | 4928-4948 | 6174-6194 | UTGCCGTAGUCAG | 265 | 4926-4948 | 6172-6194 |
| 1628443 | ACUACGGCAA | | | | CAAUCUUUGC | | | |
| AD- | AAGAUUGCUGA | 110 | 4929-4949 | 6175-6195 | UAUGCCGUAGUCA | 266 | 4927-4949 | 6173-6195 |
| 1628444 | CUACGGCAUA | | | | GCAAUCUUUG | | | |
| AD- | UCAGUACUGCUG | 111 | 4952-4972 | 6198-6218 | UCCATUCUACAGC | 267 | 4950-4972 | 6196-6218 |
| 1628467 | UAGAAUGGA | | | | AGUACUGAGC | | | |
| AD- | CUACUCUAUGAC | 112 | 5073-5093 | 6319-6339 | UGUCAAAAUGUCA | 268 | 5071-5093 | 6317-6339 |
| 1628570 | AUUUUGACA | | | | UAGAGUAGUA | | | |
| AD- | AACUGGAGGUA | 113 | 5093-5113 | 6339-6359 | UCUACUAUUCUAC | 269 | 5091-5113 | 6337-6359 |
| 1628590 | GAAUAGUAGA | | | | CUCCAGUUGU | | | |
| AD- | CCAGUUAAAGA | 114 | 5172-5192 | 6418-6438 | UCAACCAUAUUCU | 270 | 5170-5192 | 6416-6438 |
| 1628668 | AUAUGGUUGA | | | | UUAACUGGAU | | | |
| AD- | GAAUUCAGCUG | 115 | 5285-5305 | 6531-6551 | UAGACUAAUUCAG | 271 | 5283-5305 | 6529-6551 |
| 1628754 | AAUUAGUCUA | | | | CUGAAUUCAA | | | |
| AD- | CAGCUGAAUUA | 116 | 5290-5310 | 6536-6556 | UCAGACAGACUAA | 272 | 5288-5310 | 6534-6556 |
| 1628759 | GUCUGUCUGA | | | | UUCAGCUGAA | | | |
| AD- | GAAUUAGUCUG | 117 | 5295-5315 | 6541-6561 | UCUCGUCAGACAG | 273 | 5293-5315 | 6539-6561 |
| 1628764 | UCUGACGAGA | | | | ACUAAUUCAG | | | |
| AD- | ACCUAAAAACGU | 118 | 5327-5347 | 6573-6593 | UCAACAAUUACGU | 274 | 5325-5347 | 6571-6593 |
| 1628794 | AAUUGUUGA | | | | UUUUAGGUAA | | | |
| AD- | GAGGACAGCUCU | 119 | 5416-5436 | 6662-6682 | UAAGAAAUGAGA | 275 | 5414-5436 | 6660-6682 |
| 1628883 | CAUUUCUUA | | | | GCUGUCCUCUG | | | |
| AD- | AUAUUGUGCUU | 120 | 5484-5504 | 6730-6750 | UACCAAGGCUAAG | 276 | 5482-5504 | 6728-6750 |
| 1628951 | AGCCUUGGUA | | | | CACAAUAUUC | | | |
| AD- | UAGCCUUGGUGC | 121 | 5494-5514 | 6740-6760 | UAGGAAGAUGCAC | 277 | 5492-5514 | 6738-6760 |
| 1628961 | AUCUUCCUA | | | | CAAGGCUAAG | | | |
| AD- | GCCUUGGUGCAU | 122 | 5496-5516 | 6742-6762 | UACAGGAAGAUGC | 278 | 5494-5516 | 6740-6762 |
| 1628963 | CUUCCUGUA | | | | ACCAAGGCUA | | | |
| AD- | UGGGACACAGUC | 123 | 5540-5560 | 6786-6806 | UGAGTACCAGACU | 279 | 5538-5560 | 6784-6806 |
| 1629007 | UGGUACUCA | | | | GUGUCCCAGA | | | |
| AD- | CACAGUCUGGUA | 124 | 5545-5565 | 6791-6811 | UCAGGAGAGUACC | 280 | 5543-5565 | 6789-6811 |
| 1629012 | CUCUCCUGA | | | | AGACUGUGUC | | | |
| AD- | CUCUCCUGGUCA | 125 | 5557-5577 | 6803-6823 | UGGUAUTGAUGAC | 281 | 5555-5577 | 6801-6823 |
| 1629024 | UCAAUACCA | | | | CAGGAGAGUA | | | |
| AD- | UCUCCUGGUCAU | 126 | 5558-5578 | 6804-6824 | UCGGTATUGAUGA | 282 | 5556-5578 | 6802-6824 |
| 1629025 | CAAUACCGA | | | | CCAGGAGAGU | | | |
| AD- | CUCCUGGUCAUC | 127 | 5559-5579 | 6805-6825 | UTCGGUAUUGATG | 283 | 5557-5579 | 6803-6825 |
| 1629026 | AAUACCGAA | | | | ACCAGGAGAG | | | |
| AD- | CCUGGUCAUCAA | 128 | 5561-5581 | 6807-6827 | UCUUCGGUAUUGA | 284 | 5559-5581 | 6805-6827 |
| 1629028 | UACCGAAGA | | | | UGACCAGGAG | | | |
| AD- | GGUCAUCAAUAC | 129 | 5564-5584 | 6810-6830 | UCAUCUTCGGUAU | 285 | 5562-5584 | 6808-6830 |
| 1629031 | CGAAGAUGA | | | | UGAUGACCAG | | | |
| AD- | GUCAUCAAUACC | 130 | 5565-5585 | 6811-6831 | UCCATCTUCGGTA | 286 | 5563-5585 | 6809-6831 |
| 1629032 | GAAGAUGGA | | | | UUGAUGACCA | | | |
| AD- | UCAUCAAUACCG | 131 | 5566-5586 | 6812-6832 | UCCCAUCUUCGGU | 287 | 5564-5586 | 6810-6832 |
| 1629033 | AAGAUGGGA | | | | AUUGAUGACC | | | |
| AD- | AUACCGAAGAU | 132 | 5572-5592 | 6818-6838 | UCUUTUTCCCATC | 288 | 5570-5592 | 6816-6838 |
| 1629039 | GGGAAAAAGA | | | | UUCGGUAUUG | | | |
| AD- | CUUGUUUGUAU | 133 | 5626-5646 | 6872-6892 | UGGAAUTGCAATA | 289 | 5624-5646 | 6870-6892 |
| 1629092 | UGCAAUUCCA | | | | CAAACAAGUG | | | |
| AD- | UACUAAAUAUA | 134 | 5758-5778 | 7004-7024 | UGACAUTUCCUAU | 290 | 5756-5778 | 7002-7024 |
| 1629200 | GGAAAUGUCA | | | | AUUUAGUAUC | | | |
| AD- | AAUGUCAGUAC | 135 | 5772-5792 | 7018-7038 | UAUCAATGGAGTA | 291 | 5770-5792 | 7016-7038 |
| 1629214 | UCCAUUGAUA | | | | CUGACAUUUC | | | |
| AD- | UGUCAGUACUCC | 136 | 5774-5794 | 7020-7040 | UACATCAAUGGAG | 292 | 5772-5794 | 7018-7040 |
| 1629216 | AUUGAUGUA | | | | UACUGACAUU | | | |
| AD- | ACUCCAUUGAUG | 137 | 5781-5801 | 7027-7047 | UCUCAAACACATC | 293 | 5779-5801 | 7025-7047 |
| 1629223 | UGUUUGAGA | | | | AAUGGAGUAC | | | |
| AD- | CUCCAUUGAUGU | 138 | 5782-5802 | 7028-7048 | UACUCAAACACAU | 294 | 5780-5802 | 7026-7048 |
| 1629224 | GUUUGAGUA | | | | CAAUGGAGUA | | | |
| AD- | GAGGAUGUGGC | 139 | 5839-5859 | 7085-7105 | UAAUCUTUGUGCC | 295 | 5837-5859 | 7083-7105 |
| 1629263 | ACAAAGAUUA | | | | ACAUCCUCCC | | | |
| AD- | UUUUCUCCUUUU | 140 | 5857-5877 | 7103-7123 | UAUCAUTAGAAAA | 296 | 5855-5877 | 7101-7123 |
| 1629280 | CUAAUGAUA | | | | GGAGAAAAUC | | | |
| AD- | CUAAUGAUUUC | 141 | 5869-5889 | 7115-7135 | UCUGAATGGUGAA | 297 | 5867-5889 | 7113-7135 |
| 1629292 | ACCAUUCAGA | | | | AUCAUUAGAA | | | |
| AD- | AUUUCACCAUUC | 142 | 5875-5895 | 7121-7141 | UGAGTUTCUGAAU | 298 | 5873-5895 | 7119-7141 |
| 1629298 | AGAAACUCA | | | | GGUGAAAUCA | | | |
| AD- | CCAUUCAGAAAC | 143 | 5881-5901 | 7127-7147 | UCUCAATGAGUTU | 299 | 5879-5901 | 7125-7147 |
| 1629304 | UCAUUGAGA | | | | CUGAAUGGUG | | | |
| AD- | UAGCCCUGUUGU | 144 | 5996-6016 | 7242-7262 | UACACUTCCACAA | 300 | 5994-6016 | 7240-7262 |
| 1629419 | GGAAGUGUA | | | | CAGGGCUAUU | | | |
| AD- | AAACACAAAAU | 145 | 6102-6122 | 7348-7368 | UGAATAAGACATU | 301 | 6100-6122 | 7346-7368 |
| 1629524 | GUCUUAUUCA | | | | UUGUGUUUUG | | | |
| AD- | AGAACACUGCUC | 146 | 6151-6171 | 7397-7417 | UTAUCCAAAGAGC | 302 | 6149-6171 | 7395-7417 |
| 1629573 | UUUGGAUAA | | | | AGUGUUCUUC | | | |
| AD- | UGCUCUUUGGA | 147 | 6158-6178 | 7404-7424 | UCAGTUCCUAUCC | 303 | 6156-6178 | 7402-7424 |
| 1629580 | UAGGAACUGA | | | | AAAGAGCAGU | | | |
| AD- | GCUCUUUGGAU | 148 | 6159-6179 | 7405-7425 | UCCAGUTCCUATC | 304 | 6157-6179 | 7403-7425 |
| 1629581 | AGGAACUGGA | | | | CAAAGAGCAG | | | |
| AD- | CUGGAGGAGGCC | 149 | 6175-6195 | 7421-7441 | UTAAAATAUGGCC | 305 | 6173-6195 | 7419-7441 |
| 1629597 | AUAUUUUAA | | | | UCCUCCAGUU | | | |
| AD- | CCUGGAUCUUUC | 150 | 6197-6217 | 7443-7463 | UGACGAGUUGAAA | 306 | 6195-6217 | 7441-7463 |
| 1629619 | AACUCGUCA | | | | GAUCCAGGAG | | | |
| AD- | CUGGAUCUUUCA | 151 | 6198-6218 | 7444-7464 | UCGACGAGUUGAA | 307 | 6196-6218 | 7442-7464 |
| 1629620 | ACUCGUCGA | | | | AGAUCCAGGA | | | |
| AD- | UGGAUCUUUCA | 152 | 6199-6219 | 7445-7465 | UTCGACGAGUUGA | 308 | 6197-6219 | 7443-7465 |
| 1629621 | ACUCGUCGAA | | | | AAGAUCCAGG | | | |
| AD- | AUUCGGUCAGA | 153 | 6247-6267 | 7493-7513 | UCAUCATGACUCU | 309 | 6245-6267 | 7491-7513 |
| 1629665 | GUCAUGAUGA | | | | GACCGAAUUA | | | |
| AD- | AAAAUGUCAUG | 154 | 6289-6309 | 7535-7555 | UCAATACCAGCAU | 310 | 6287-6309 | 7533-7555 |
| 1629707 | CUGGUAUUGA | | | | GACAUUUUUA | | | |
| AD- | AUGUCAUGCUG | 155 | 6292-6312 | 7538-7558 | UGCCCAAUACCAG | 311 | 6290-6312 | 7536-7558 |
| 1629710 | GUAUUGGGCA | | | | CAUGACAUUU | | | |
| AD- | UGUCAUGCUGG | 156 | 6293-6313 | 7539-7559 | UAGCCCAAUACCA | 312 | 6291-6313 | 7537-7559 |
| 1629711 | UAUUGGGCUA | | | | GCAUGACAUU | | | |
| AD- | GAAAGAGAUAC | 157 | 6347-6367 | 7593-7613 | UAGCAAGAUUGTA | 313 | 6345-6367 | 7591-7613 |
| 1629763 | AAUCUUGCUA | | | | UCUCUUUCUG | | | |
| AD- | CAAUCUUCCACA | 158 | 6383-6403 | 7629-7649 | UGCACUTCAUGTG | 314 | 6381-6403 | 7627-7649 |
| 1629799 | UGAAGUGCA | | | | GAAGAUUGAU | | | |
| AD- | CACAUGAAGUGC | 159 | 6391-6411 | 7637-7657 | UTAAAUTUUGCAC | 315 | 6389-6411 | 7635-7657 |
| 1629807 | AAAAUUUAA | | | | UUCAUGUGGA | | | |
| AD- | ACAUGAAGUGC | 160 | 6392-6412 | 7638-7658 | UCUAAATUUUGCA | 316 | 6390-6412 | 7636-7658 |
| 1629808 | AAAAUUUAGA | | | | CUUCAUGUGG | | | |
| AD- | CAUGAAGUGCA | 161 | 6393-6413 | 7639-7659 | UTCUAAAUUUUGC | 317 | 6391-6413 | 7637-7659 |
| 1629809 | AAAUUUAGAA | | | | ACUUCAUGUG | | | |
| AD- | AGUGAGAAAAG | 162 | 6425-6445 | 7671-7691 | UCAGCUAAUUCTU | 318 | 6423-6445 | 7669-7691 |
| 1629838 | AAUUAGCUGA | | | | UUCUCACUUC | | | |
| AD- | AUAGGAAUUGU | 163 | 6481-6501 | 7727-7747 | UTAUCCAAAGACA | 319 | 6479-6501 | 7725-7747 |
| 1629876 | CUUUGGAUAA | | | | AUUCCUAUUU | | | |
| AD- | AGGAAUUGUCU | 164 | 6483-6503 | 7729-7749 | UCCUAUCCAAAGA | 320 | 6481-6503 | 7727-7749 |
| 1629878 | UUGGAUAGGA | | | | CAAUUCCUAU | | | |
| AD- | AAAAUAUUAAG | 165 | 6888-6908 | 8134-8154 | UGGAAACUGUCTU | 321 | 6886-6908 | 8132-8154 |
| 1630135 | ACAGUUUCCA | | | | AAUAUUUUCA | | | |
| AD- | AAAUAUUAAGA | 166 | 6889-6909 | 8135-8155 | UGGGAAACUGUCU | 322 | 6887-6909 | 8133-8155 |
| 1630136 | CAGUUUCCCA | | | | UAAUAUUUUC | | | |

TABLE 4
Unmodified Sense and Antisense Strand Sequences of Human Reactive LRRK2 dsRNA
Agents

| Duplex | Sense Sequence | SEQ | Range in | Antisense Sequence | SEQ | Range in |
|---|---|---|---|---|---|---|
| ID | 5′ to 3′ | ID NO: | NM_198578.4 | 5′ to 3′ | ID NO: | NM_198578.4 |
| AD- | AGAAGCAUAUACAUU | 323 | 1484-1504 | UAGGAGAAUGUAUA | 526 | 1482-1504 |
| 1631019 | CUCCUA | | | UGCUUCUGC | | |
| AD- | GCAUAUACAUUCUCC | 324 | 1488-1508 | UCUUCAGGAGAAUG | 527 | 1486-1508 |
| 1631020 | UGAAGA | | | UAUAUGCUU | | |
| AD- | UGAUAUUCACAAACU | 325 | 1755-1775 | UGGACCAGUUUGUG | 528 | 1753-1775 |
| 1631021 | GGUCCA | | | AAUAUCAUU | | |
| AD- | UCACAAACUGGUCCU | 326 | 1761-1781 | UCUGCUAGGACCAG | 529 | 1759-1781 |
| 1631022 | AGCAGA | | | UUUGUGAAU | | |
| AD- | UCACACACUGCAGAU | 327 | 1905-1925 | UGAUACAUCUGCAG | 530 | 1903-1925 |
| 1631023 | GUAUCA | | | UGUGUGAAG | | |
| AD- | UGUCUGGGUUUAAGU | 328 | 1945-1965 | UAUAAGACUUAAAC | 531 | 1943-1965 |
| 1631024 | CUUAUA | | | CCAGACACU | | |
| AD- | GGGUUUAAGUCUUAU | 329 | 1950-1970 | UAUCCUAUAAGACU | 532 | 1948-1970 |
| 1631025 | AGGAUA | | | UAAACCCAG | | |
| AD- | GUUUCCAGCUUAUAC | 330 | 2029-2049 | UAAUCGGUAUAAGC | 533 | 2027-2049 |
| 1631026 | CGAUUA | | | UGGAAACCA | | |
| AD- | UUCUAAACCUCUGUU | 331 | 2207-2227 | UCUUGCAACAGAGG | 534 | 2205-2227 |
| 1631027 | GCAAGA | | | UUUAGAAAC | | |
| AD- | AACCUCUGUUGCAAG | 332 | 2212-2232 | UAAACACUUGCAAC | 535 | 2210-2232 |
| 1631028 | UGUUUA | | | AGAGGUUUA | | |
| AD- | ACCUCUGUUGCAAGU | 333 | 2213-2233 | UAAAACACUUGCAA | 536 | 2211-2233 |
| 1631029 | GUUUUA | | | CAGAGGUUU | | |
| AD- | UCUCGUGAACAAGAU | 334 | 2431-2451 | UCGUACAUCUUGUU | 537 | 2429-2451 |
| 1631030 | GUACGA | | | CACGAGAUC | | |
| AD- | GGCCAACAAUAGCAU | 335 | 2529-2549 | UGGCAAAUGCUAUU | 538 | 2527-2549 |
| 1631031 | UUGCCA | | | GUUGGCCAC | | |
| AD- | AGGAAAAGUUGAACC | 336 | 2565-2585 | UAAGAAGGUUCAAC | 539 | 2563-2585 |
| 1631032 | UUCUUA | | | UUUUCCUAU | | |
| AD- | AAAGUUGAACCUUCU | 337 | 2569-2589 | UAGCCAAGAAGGUU | 540 | 2567-2589 |
| 1631033 | UGGCUA | | | CAACUUUUC | | |
| AD- | CACUAGCAAGAAUGG | 338 | 2648-2668 | UGAUCACCAUUCUU | 541 | 2646-2668 |
| 1631034 | UGAUCA | | | GCUAGUGUA | | |
| AD- | UUUAUUCCUGACUCU | 339 | 2764-2784 | UAUAGAAGAGUCAG | 542 | 2762-2784 |
| 1631035 | UCUAUA | | | GAAUAAAGG | | |
| AD- | AGGAGAAUUUUACCG | 340 | 2874-2894 | UCAUCUCGGUAAAA | 543 | 2872-2894 |
| 1631036 | AGAUGA | | | UUCUCCUAC | | |
| AD- | UUUUACCGAGAUGCC | 341 | 2881-2901 | UAAUACGGCAUCUC | 544 | 2879-2901 |
| 1631037 | GUAUUA | | | GGUAAAAUU | | |
| AD- | CAGCAUUUCUUCUCU | 342 | 3051-3071 | UAAGCCAGAGAAGA | 545 | 3049-3071 |
| 1631038 | GGCUUA | | | AAUGCUGUC | | |
| AD- | CAGAAUGCACUCACG | 343 | 3193-3213 | UAAGCUCGUGAGUG | 546 | 3191-3213 |
| 1631039 | AGCUUA | | | CAUUCUGGU | | |
| AD- | UGCACUCACGAGCUU | 344 | 3198-3218 | UGUGGAAAGCUCGU | 547 | 3196-3218 |
| 1631040 | UCCACA | | | GAGUGCAUU | | |
| AD- | AGCUUUCCACAACAGC | 345 | 3208-3228 | UCAUAGCUGUUGUG | 548 | 3206-3228 |
| 1631041 | UAUGA | | | GAAAGCUCG | | |
| AD- | CUCUCGAAAUGACAU | 346 | 3330-3350 | UGUCCAAUGUCAUU | 549 | 3328-3350 |
| 1631042 | UGGACA | | | UCGAGAGAC | | |
| AD- | UCUCGAAAUGACAUU | 347 | 3331-3351 | UGGUCCAAUGUCAU | 550 | 3329-3351 |
| 1631043 | GGACCA | | | UUCGAGAGA | | |
| AD- | CCUCAGUGGUUUUAG | 348 | 3350-3370 | UAGGAUCUAAAACC | 551 | 3348-3370 |
| 1631044 | AUCCUA | | | ACUGAGGGU | | |
| AD- | GUCCAACUCUGAAAC | 349 | 3380-3400 | UAAACUGUUUCAGA | 552 | 3378-3400 |
| 1631045 | AGUUUA | | | GUUGGACAU | | |
| AD- | GAAACAGUUUAACCU | 350 | 3390-3410 | UAUGACAGGUUAAA | 553 | 3388-3410 |
| 1631046 | GUCAUA | | | CUGUUUCAG | | |
| AD- | AGUUUAACCUGUCAU | 351 | 3395-3415 | UGUUAUAUGACAGG | 554 | 3393-3415 |
| 1631047 | AUAACA | | | UUAAACUGU | | |
| AD- | GAACUUUCUUGAGGC | 352 | 3573-3593 | UGACAAGCCUCAAG | 555 | 3571-3593 |
| 1631048 | UUGUCA | | | AAAGUUCUC | | |
| AD- | AAUUUUCUUGCUGCU | 353 | 3622-3642 | UGGCAUAGCAGCAA | 556 | 3620-3642 |
| 1631049 | AUGCCA | | | GAAAAUUCA | | |
| AD- | CUGCUAUGCCUUUCU | 354 | 3632-3652 | UAGGCAAGAAAGGC | 557 | 3630-3652 |
| 1631050 | UGCCUA | | | AUAGCAGCA | | |
| AD- | UUAAAUCUUCCACAC | 355 | 3712-3732 | UCGCAAGUGUGGAA | 558 | 3710-3732 |
| 1631051 | UUGCGA | | | GAUUUAAAA | | |
| AD- | AAUCUUCCACACUUGC | 356 | 3715-3735 | UGACCGCAAGUGUG | 559 | 3713-3735 |
| 1631052 | GGUCA | | | GAAGAUUUA | | |
| AD- | UCUUCCACACUUGCGG | 357 | 3717-3737 | UAAGACCGCAAGUG | 560 | 3715-3737 |
| 1631053 | UCUUA | | | UGGAAGAUU | | |
| AD- | CUUCCACACUUGCGGU | 358 | 3718-3738 | UAAAGACCGCAAGU | 561 | 3716-3738 |
| 1631054 | CUUUA | | | GUGGAAGAU | | |
| AD- | AUAUGAGCAGCAAUG | 359 | 3740-3760 | UAAUAUCAUUGCUG | 562 | 3738-3760 |
| 1631055 | AUAUUA | | | CUCAUAUCU | | |
| AD- | GAACUUAAGGGAACU | 360 | 3795-3815 | UAUAAGAGUUCCCU | 563 | 3793-3815 |
| 1631056 | CUUAUA | | | UAAGUUCAA | | |
| AD- | AACUCUUAUUUAGCC | 361 | 3806-3826 | UAUUAUGGCUAAAU | 564 | 3804-3826 |
| 1631057 | AUAAUA | | | AAGAGUUCC | | |
| AD- | AUCAGCAUCUUGGAC | 362 | 3829-3849 | UCUCAAGUCCAAGA | 565 | 3827-3849 |
| 1631058 | UUGAGA | | | UGCUGAUCU | | |
| AD- | UCAGCAUCUUGGACU | 363 | 3830-3850 | UACUCAAGUCCAAG | 566 | 3828-3850 |
| 1631059 | UGAGUA | | | AUGCUGAUC | | |
| AD- | AAAAUCUGACAUCUC | 364 | 3938-3958 | UAUCCAGAGAUGUC | 567 | 3936-3958 |
| 1631060 | UGGAUA | | | AGAUUUUCA | | |
| AD- | CUCUGGAUGUCAGUU | 365 | 3950-3970 | UGUUGUAACUGACA | 568 | 3948-3970 |
| 1631061 | ACAACA | | | UCCAGAGAU | | |
| AD- | UGGAACUAAGAUCCU | 366 | 3971-3991 | UGGGAAAGGAUCUU | 569 | 3969-3991 |
| 1631062 | UUCCCA | | | AGUUCCAAG | | |
| AD- | AGCGAGCAUUGUACC | 367 | 4367-4387 | UAGCAAGGUACAAU | 570 | 4365-4387 |
| 1631063 | UUGCUA | | | GCUCGCUGC | | |
| AD- | UGUACCUUGCUGUCU | 368 | 4376-4396 | UGUCAUAGACAGCA | 571 | 4374-4396 |
| 1631064 | AUGACA | | | AGGUACAAU | | |
| AD- | AAUAUAAAGGCUCGC | 369 | 4444-4464 | UGAAGCGCGAGCCU | 572 | 4442-4464 |
| 1631065 | GCUUCA | | | UUAUAUUGA | | |
| AD- | UAUAAAGGCUCGCGC | 370 | 4446-4466 | UAAGAAGCGCGAGC | 573 | 4444-4466 |
| 1631066 | UUCUUA | | | CUUUAUAUU | | |
| AD- | AUAAAGGCUCGCGCU | 371 | 4447-4467 | UGAAGAAGCGCGAG | 574 | 4445-4467 |
| 1631067 | UCUUCA | | | CCUUUAUAU | | |
| AD- | ACUCCUGAAUAAGCG | 372 | 4551-4571 | UACCCUCGCUUAUUC | 575 | 4549-4571 |
| 1631068 | AGGGUA | | | AGGAGUUC | | |
| AD- | CCUGAAUAAGCGAGG | 373 | 4554-4574 | UGGAACCCUCGCUUA | 576 | 4552-4574 |
| 1631069 | GUUCCA | | | UUCAGGAG | | |
| AD- | UCCAGACUGCUAUGU | 374 | 4704-4724 | UGUUCUACAUAGCA | 577 | 4702-4724 |
| 1631070 | AGAACA | | | GUCUGGAAU | | |
| AD- | AAUGAGCUUCCUCAC | 375 | 4834-4854 | UACUGCGUGAGGAA | 578 | 4832-4854 |
| 1631071 | GCAGUA | | | GCUCAUUUU | | |
| AD- | GCUUCCUCACGCAGUU | 376 | 4839-4859 | UAGUGAACUGCGUG | 579 | 4837-4859 |
| 1631072 | CACUA | | | AGGAAGCUC | | |
| AD- | UUGUGGAACCCAAGU | 377 | 4925-4945 | UAAGCCACUUGGGU | 580 | 4923-4945 |
| 1631073 | GGCUUA | | | UCCACAAAG | | |
| AD- | CAGUGAAAGUGGAAG | 378 | 4970-4990 | UACAACCUUCCACUU | 581 | 4968-4990 |
| 1631074 | GUUGUA | | | UCACUGUC | | |
| AD- | AGUGAAAGUGGAAGG | 379 | 4971-4991 | UGACAACCUUCCACU | 582 | 4969-4991 |
| 1631075 | UUGUCA | | | UUCACUGU | | |
| AD- | GUGAAAGUGGAAGGU | 380 | 4972-4992 | UGGACAACCUUCCAC | 583 | 4970-4992 |
| 1631076 | UGUCCA | | | UUUCACUG | | |
| AD- | UCCAAAGAACUACAU | 381 | 5058-5078 | UGUGACAUGUAGUU | 584 | 5056-5078 |
| 1631077 | GUCACA | | | CUUUGGAAA | | |
| AD- | CUAGAAAAAUUCCAG | 382 | 5092-5112 | UGCAAUCUGGAAUU | 585 | 5090-5112 |
| 1631078 | AUUGCA | | | UUUCUAGGA | | |
| AD- | GAAUAUUUGCUGGUU | 383 | 5128-5148 | UCUUGGAACCAGCA | 586 | 5126-5148 |
| 1631079 | CCAAGA | | | AAUAUUCUU | | |
| AD- | CUCUGAAAUUAUCAU | 384 | 5196-5216 | UGUCGGAUGAUAAU | 587 | 5194-5216 |
| 1631080 | CCGACA | | | UUCAGAGUU | | |
| AD- | GCCUUAUUUUCCAAU | 385 | 5226-5246 | UAUCCCAUUGGAAA | 588 | 5224-5246 |
| 1631081 | GGGAUA | | | AUAAGGCAU | | |
| AD- | GAGAUUUCACCUUAC | 386 | 5275-5295 | UAGCAUGUAAGGUG | 589 | 5273-5295 |
| 1631082 | AUGCUA | | | AAAUCUCAA | | |
| AD- | AAACAGAAUGUAUUG | 387 | 5322-5342 | UGUCGCCAAUACAU | 590 | 5320-5342 |
| 1631083 | GCGACA | | | UCUGUUUGG | | |
| AD- | UUACUUAAAUUGGUC | 388 | 5349-5369 | UCAGGAGACCAAUU | 591 | 5347-5369 |
| 1631084 | UCCUGA | | | UAAGUAAAU | | |
| AD- | CUUAAAUUGGUCUCC | 389 | 5352-5372 | UCUUCAGGAGACCA | 592 | 5350-5372 |
| 1631085 | UGAAGA | | | AUUUAAGUA | | |
| AD- | CCUGAAGCUUAUUGU | 390 | 5365-5385 | UACCAGACAAUAAG | 593 | 5363-5385 |
| 1631086 | CUGGUA | | | CUUCAGGAG | | |
| AD- | UGAAGCUUAUUGUCU | 391 | 5367-5387 | UCUACCAGACAAUA | 594 | 5365-5387 |
| 1631087 | GGUAGA | | | AGCUUCAGG | | |
| AD- | GAAGCUUAUUGUCUG | 392 | 5368-5388 | UCCUACCAGACAAUA | 595 | 5366-5388 |
| 1631088 | GUAGGA | | | AGCUUCAG | | |
| AD- | AGCUUAUUGUCUGGU | 393 | 5370-5390 | UAUCCUACCAGACAA | 596 | 5368-5390 |
| 1631089 | AGGAUA | | | UAAGCUUC | | |
| AD- | UUAUUGUCUGGUAGG | 394 | 5373-5393 | UCAGAUCCUACCAGA | 597 | 5371-5393 |
| 1631090 | AUCUGA | | | CAAUAAGC | | |
| AD- | CUUUUGGGCCAAGUU | 395 | 5461-5481 | UUCCACAACUUGGCC | 598 | 5459-5481 |
| 1631091 | GUGGAA | | | CAAAAGAA | | |
| AD- | UGUGGACCACAUUGA | 396 | 5475-5495 | UGAGAATCAAUGUG | 599 | 5473-5495 |
| 1631092 | UUCUCA | | | GUCCACAAC | | |
| AD- | CACAUUGAUUCUCUC | 397 | 5482-5502 | UUCCAUGAGAGAAU | 600 | 5480-5502 |
| 1631093 | AUGGAA | | | CAAUGUGGU | | |
| AD- | GGGUUGCUGGAGAUU | 398 | 5515-5535 | UAUAUCAAUCUCCA | 601 | 5513-5535 |
| 1631094 | GAUAUA | | | GCAACCCAG | | |
| AD- | GGUUGCUGGAGAUUG | 399 | 5516-5536 | UAAUAUCAAUCUCC | 602 | 5514-5536 |
| 1631095 | AUAUUA | | | AGCAACCCA | | |
| AD- | UGAAGGAGAAACUCU | 400 | 5541-5561 | UUCAACAGAGUUUC | 603 | 5539-5561 |
| 1631096 | GUUGAA | | | UCCUUCACC | | |
| AD- | UUGAAGAAAUGGGCA | 401 | 5557-5577 | UUAUAATGCCCAUUU | 604 | 5555-5577 |
| 1631097 | UUAUAA | | | CUUCAACA | | |
| AD- | AAUCUUACUUGAUGA | 402 | 5607-5627 | UUCAAGTCAUCAAGU | 605 | 5605-5627 |
| 1631098 | CUUGAA | | | AAGAUUUU | | |
| AD- | GCAGAGGAAGGAGAU | 403 | 5635-5655 | UAAGAGAUCUCCUU | 606 | 5633-5655 |
| 1631099 | CUCUUA | | | CCUCUGCUU | | |
| AD- | GAAGGAGAUCUCUUA | 404 | 5641-5661 | UUUUACTAAGAGAU | 607 | 5639-5661 |
| 1631100 | GUAAAA | | | CUCCUUCCU | | |
| AD- | AGGAGAUCUCUUAGU | 405 | 5643-5663 | UGAUUUACUAAGAG | 608 | 5641-5663 |
| 1631101 | AAAUCA | | | AUCUCCUUC | | |
| AD- | GGAGAUCUCUUAGUA | 406 | 5644-5664 | UGGAUUTACUAAGA | 609 | 5642-5664 |
| 1631102 | AAUCCA | | | GAUCUCCUU | | |
| AD- | AGAUCUCUUAGUAAA | 407 | 5646-5666 | UCUGGATUUACUAA | 610 | 5644-5666 |
| 1631103 | UCCAGA | | | GAGAUCUCC | | |
| AD- | AGUAAAUCCAGAUCA | 408 | 5655-5675 | UUUGGUTGAUCUGG | 611 | 5653-5675 |
| 1631104 | ACCAAA | | | AUUUACUAA | | |
| AD- | AAUCCAGAUCAACCA | 409 | 5659-5679 | UAGCCUTGGUUGAUC | 612 | 5657-5679 |
| 1631105 | AGGCUA | | | UGGAUUUA | | |
| AD- | AUCCAGAUCAACCAA | 410 | 5660-5680 | UGAGCCTUGGUUGA | 613 | 5658-5680 |
| 1631106 | GGCUCA | | | UCUGGAUUU | | |
| AD- | CCAAGGCUCACCAUUC | 411 | 5671-5691 | UAUUGGAAUGGUGA | 614 | 5669-5691 |
| 1631107 | CAAUA | | | GCCUUGGUU | | |
| AD- | AGGCUCACCAUUCCAA | 412 | 5674-5694 | UGAUAUTGGAAUGG | 615 | 5672-5694 |
| 1631108 | UAUCA | | | UGAGCCUUG | | |
| AD- | CAUUCCAAUAUCUCA | 413 | 5682-5702 | UCAAUCTGAGAUAU | 616 | 5680-5702 |
| 1631109 | GAUUGA | | | UGGAAUGGU | | |
| AD- | AUUCCAAUAUCUCAG | 414 | 5683-5703 | UGCAAUCUGAGAUA | 617 | 5681-5703 |
| 1631110 | AUUGCA | | | UUGGAAUGG | | |
| AD- | UUCCAAUAUCUCAGA | 415 | 5684-5704 | UGGCAATCUGAGAU | 618 | 5682-5704 |
| 1631111 | UUGCCA | | | AUUGGAAUG | | |
| AD- | UGACCUGCCUAGAAA | 416 | 5721-5741 | UUAAUATUUCUAGG | 619 | 5719-5741 |
| 1631112 | UAUUAA | | | CAGGUCAGC | | |
| AD- | GUUGGAAUUUGAACA | 417 | 5757-5777 | UGAGCUTGUUCAAA | 620 | 5755-5777 |
| 1631113 | AGCUCA | | | UUCCAACUC | | |
| AD- | AUUUGAACAAGCUCC | 418 | 5763-5783 | UACUCUGGAGCUUG | 621 | 5761-5783 |
| 1631114 | AGAGUA | | | UUCAAAUUC | | |
| AD- | AGCUCCAGAGUUUCU | 419 | 5772-5792 | UCUAGGAGAAACUC | 622 | 5770-5792 |
| 1631115 | CCUAGA | | | UGGAGCUUG | | |
| AD- | GCUCCAGAGUUUCUCC | 420 | 5773-5793 | UCCUAGGAGAAACU | 623 | 5771-5793 |
| 1631116 | UAGGA | | | CUGGAGCUU | | |
| AD- | CCAGAGUUUCUCCUA | 421 | 5776-5796 | UUCACCTAGGAGAAA | 624 | 5774-5796 |
| 1631117 | GGUGAA | | | CUCUGGAG | | |
| AD- | CAGAGUUUCUCCUAG | 422 | 5777-5797 | UAUCACCUAGGAGA | 625 | 5775-5797 |
| 1631118 | GUGAUA | | | AACUCUGGA | | |
| AD- | AGAGUUUCUCCUAGG | 423 | 5778-5798 | UCAUCACCUAGGAG | 626 | 5776-5798 |
| 1631119 | UGAUGA | | | AAACUCUGG | | |
| AD- | GAGUUUCUCCUAGGU | 424 | 5779-5799 | UCCAUCACCUAGGAG | 627 | 5777-5799 |
| 1631120 | GAUGGA | | | AAACUCUG | | |
| AD- | UGAUGGCAGUUUUGG | 425 | 5793-5813 | UCUGAUCCAAAACU | 628 | 5791-5813 |
| 1631121 | AUCAGA | | | GCCAUCACC | | |
| AD- | GAUGGCAGUUUUGGA | 426 | 5794-5814 | UACUGATCCAAAACU | 629 | 5792-5814 |
| 1631122 | UCAGUA | | | GCCAUCAC | | |
| AD- | GAUGUUGGUGAUGGA | 427 | 5964-5984 | UCUAACTCCAUCACC | 630 | 5962-5984 |
| 1631123 | GUUAGA | | | AACAUCCG | | |
| AD- | AUGUUGGUGAUGGAG | 428 | 5965-5985 | UGCUAACUCCAUCAC | 631 | 5963-5985 |
| 1631124 | UUAGCA | | | CAACAUCC | | |
| AD- | UGUUGGUGAUGGAGU | 429 | 5966-5986 | UGGCUAACUCCAUCA | 632 | 5964-5986 |
| 1631125 | UAGCCA | | | CCAACAUC | | |
| AD- | UUAGCCUCCAAGGGU | 430 | 5980-6000 | UAAGGAACCCUUGG | 633 | 5978-6000 |
| 1631126 | UCCUUA | | | AGGCUAACU | | |
| AD- | CCUCCAAGGGUUCCUU | 431 | 5984-6004 | UAUCCAAGGAACCCU | 634 | 5982-6004 |
| 1631127 | GGAUA | | | UGGAGGCU | | |
| AD- | GCCUCACUAGAACCCU | 432 | 6029-6049 | UCUGUAGGGUUCUA | 635 | 6027-6049 |
| 1631128 | ACAGA | | | GUGAGGCUG | | |
| AD- | CCUCACUAGAACCCUA | 433 | 6030-6050 | UGCUGUAGGGUUCU | 636 | 6028-6050 |
| 1631129 | CAGCA | | | AGUGAGGCU | | |
| AD- | CUGAUGGUUUGAGAU | 434 | 6071-6091 | UGAGGUAUCUCAAA | 637 | 6069-6091 |
| 1631130 | ACCUCA | | | CCAUCAGCU | | |
| AD- | ACUCAGCCAUGAUUA | 435 | 6092-6112 | UGUAUATAAUCAUG | 638 | 6090-6112 |
| 1631131 | UAUACA | | | GCUGAGUGG | | |
| AD- | CUCAGCCAUGAUUAU | 436 | 6093-6113 | UGGUAUAUAAUCAU | 639 | 6091-6113 |
| 1631132 | AUACCA | | | GGCUGAGUG | | |
| AD- | CAGCCAUGAUUAUAU | 437 | 6095-6115 | UUCGGUAUAUAAUC | 640 | 6093-6115 |
| 1631133 | ACCGAA | | | AUGGCUGAG | | |
| AD- | CAAUGUGCUGCUUUU | 438 | 6129-6149 | UGUGUGAAAAGCAG | 641 | 6127-6149 |
| 1631134 | CACACA | | | CACAUUGUG | | |
| AD- | GCUGCUUUUCACACU | 439 | 6135-6155 | UGAUACAGUGUGAA | 642 | 6133-6155 |
| 1631135 | GUAUCA | | | AAGCAGCAC | | |
| AD- | CUGCUUUUCACACUG | 440 | 6136-6156 | UGGAUACAGUGUGA | 643 | 6134-6156 |
| 1631136 | UAUCCA | | | AAAGCAGCA | | |
| AD- | UUCACACUGUAUCCCA | 441 | 6142-6162 | UGCAUUGGGAUACA | 644 | 6140-6162 |
| 1631137 | AUGCA | | | GUGUGAAAA | | |
| AD- | ACACUGUAUCCCAAU | 442 | 6145-6165 | UGCAGCAUUGGGAU | 645 | 6143-6165 |
| 1631138 | GCUGCA | | | ACAGUGUGA | | |
| AD- | UGCAAAGAUUGCUGA | 443 | 6171-6191 | UCGUAGTCAGCAAUC | 646 | 6169-6191 |
| 1631139 | CUACGA | | | UUUGCAAU | | |
| AD- | GCAAAGAUUGCUGAC | 444 | 6172-6192 | UCCGUAGUCAGCAA | 647 | 6170-6192 |
| 1631140 | UACGGA | | | UCUUUGCAA | | |
| AD- | AAAGAUUGCUGACUA | 445 | 6174-6194 | UUGCCGTAGUCAGCA | 648 | 6172-6194 |
| 1631141 | CGGCAA | | | AUCUUUGC | | |
| AD- | AAGAUUGCUGACUAC | 446 | 6175-6195 | UAUGCCGUAGUCAG | 649 | 6173-6195 |
| 1631142 | GGCAUA | | | CAAUCUUUG | | |
| AD- | AUUGCUGACUACGGC | 447 | 6178-6198 | UGCAAUGCCGUAGU | 650 | 6176-6198 |
| 1631143 | AUUGCA | | | CAGCAAUCU | | |
| AD- | UGCUGACUACGGCAU | 448 | 6180-6200 | UGAGCAAUGCCGUA | 651 | 6178-6200 |
| 1631144 | UGCUCA | | | GUCAGCAAU | | |
| AD- | GCUCAGUACUGCUGU | 449 | 6196-6216 | UAUUCUACAGCAGU | 652 | 6194-6216 |
| 1631145 | AGAAUA | | | ACUGAGCAA | | |
| AD- | CUCAGUACUGCUGUA | 450 | 6197-6217 | UCAUUCTACAGCAGU | 653 | 6195-6217 |
| 1631146 | GAAUGA | | | ACUGAGCA | | |
| AD- | UCAGUACUGCUGUAG | 451 | 6198-6218 | UCCAUUCUACAGCAG | 654 | 6196-6218 |
| 1631147 | AAUGGA | | | UACUGAGC | | |
| AD- | GAGGUAGAAUAGUAG | 452 | 6344-6364 | UACCCUCUACUAUUC | 655 | 6342-6364 |
| 1631148 | AGGGUA | | | UACCUCCA | | |
| AD- | GUAGAGGGUUUGAAG | 453 | 6355-6375 | UGGAAACUUCAAAC | 656 | 6353-6375 |
| 1631149 | UUUCCA | | | CCUCUACUA | | |
| AD- | UUUGACAUUUUGAAU | 454 | 6520-6540 | UGCUGAAUUCAAAA | 657 | 6518-6540 |
| 1631150 | UCAGCA | | | UGUCAAAGA | | |
| AD- | CAGCUGAAUUAGUCU | 455 | 6536-6556 | UCAGACAGACUAAU | 658 | 6534-6556 |
| 1631151 | GUCUGA | | | UCAGCUGAA | | |
| AD- | GCUGAAUUAGUCUGU | 456 | 6538-6558 | UGUCAGACAGACUA | 659 | 6536-6558 |
| 1631152 | CUGACA | | | AUUCAGCUG | | |
| AD- | CUGAAUUAGUCUGUC | 457 | 6539-6559 | UCGUCAGACAGACU | 660 | 6537-6559 |
| 1631153 | UGACGA | | | AAUUCAGCU | | |
| AD- | GAAUUAGUCUGUCUG | 458 | 6541-6561 | UCUCGUCAGACAGAC | 661 | 6539-6561 |
| 1631154 | ACGAGA | | | UAAUUCAG | | |
| AD- | UAGUAGAAUAUUGUG | 459 | 6723-6743 | UCUAAGCACAAUAU | 662 | 6721-6743 |
| 1631155 | CUUAGA | | | UCUACUAUC | | |
| AD- | AGUAGAAUAUUGUGC | 460 | 6724-6744 | UGCUAAGCACAAUA | 663 | 6722-6744 |
| 1631156 | UUAGCA | | | UUCUACUAU | | |
| AD- | AAUAUUGUGCUUAGC | 461 | 6729-6749 | UCCAAGGCUAAGCAC | 664 | 6727-6749 |
| 1631157 | CUUGGA | | | AAUAUUCU | | |
| AD- | AUAUUGUGCUUAGCC | 462 | 6730-6750 | UACCAAGGCUAAGC | 665 | 6728-6750 |
| 1631158 | UUGGUA | | | ACAAUAUUC | | |
| AD- | GCUUAGCCUUGGUGC | 463 | 6737-6757 | UAAGAUGCACCAAG | 666 | 6735-6757 |
| 1631159 | AUCUUA | | | GCUAAGCAC | | |
| AD- | UAGCCUUGGUGCAUC | 464 | 6740-6760 | UAGGAAGAUGCACC | 667 | 6738-6760 |
| 1631160 | UUCCUA | | | AAGGCUAAG | | |
| AD- | GCCUUGGUGCAUCUU | 465 | 6742-6762 | UACAGGAAGAUGCA | 668 | 6740-6762 |
| 1631161 | CCUGUA | | | CCAAGGCUA | | |
| AD- | CCUUGGUGCAUCUUCC | 466 | 6743-6763 | UAACAGGAAGAUGC | 669 | 6741-6763 |
| 1631162 | UGUUA | | | ACCAAGGCU | | |
| AD- | UGGGACACAGUCUGG | 467 | 6786-6806 | UGAGUACCAGACUG | 670 | 6784-6806 |
| 1631163 | UACUCA | | | UGUCCCAGA | | |
| AD- | GGGACACAGUCUGGU | 468 | 6787-6807 | UAGAGUACCAGACU | 671 | 6785-6807 |
| 1631164 | ACUCUA | | | GUGUCCCAG | | |
| AD- | CACAGUCUGGUACUC | 469 | 6791-6811 | UCAGGAGAGUACCA | 672 | 6789-6811 |
| 1631165 | UCCUGA | | | GACUGUGUC | | |
| AD- | CAGUCUGGUACUCUCC | 470 | 6793-6813 | UACCAGGAGAGUAC | 673 | 6791-6813 |
| 1631166 | UGGUA | | | CAGACUGUG | | |
| AD- | AGUCUGGUACUCUCC | 471 | 6794-6814 | UGACCAGGAGAGUA | 674 | 6792-6814 |
| 1631167 | UGGUCA | | | CCAGACUGU | | |
| AD- | CUCUCCUGGUCAUCAA | 472 | 6803-6823 | UGGUAUTGAUGACC | 675 | 6801-6823 |
| 1631168 | UACCA | | | AGGAGAGUA | | |
| AD- | CUCCUGGUCAUCAAU | 473 | 6805-6825 | UUCGGUAUUGAUGA | 676 | 6803-6825 |
| 1631169 | ACCGAA | | | CCAGGAGAG | | |
| AD- | UCCUGGUCAUCAAUA | 474 | 6806-6826 | UUUCGGTAUUGAUG | 677 | 6804-6826 |
| 1631170 | CCGAAA | | | ACCAGGAGA | | |
| AD- | CCUGGUCAUCAAUACC | 475 | 6807-6827 | UCUUCGGUAUUGAU | 678 | 6805-6827 |
| 1631171 | GAAGA | | | GACCAGGAG | | |
| AD- | CUGGUCAUCAAUACC | 476 | 6808-6828 | UUCUUCGGUAUUGA | 679 | 6806-6828 |
| 1631172 | GAAGAA | | | UGACCAGGA | | |
| AD- | GGUCAUCAAUACCGA | 477 | 6810-6830 | UCAUCUTCGGUAUUG | 680 | 6808-6830 |
| 1631173 | AGAUGA | | | AUGACCAG | | |
| AD- | GUCAUCAAUACCGAA | 478 | 6811-6831 | UCCAUCTUCGGUAUU | 681 | 6809-6831 |
| 1631174 | GAUGGA | | | GAUGACCA | | |
| AD- | UCAUCAAUACCGAAG | 479 | 6812-6832 | UCCCAUCUUCGGUAU | 682 | 6810-6832 |
| 1631175 | AUGGGA | | | UGAUGACC | | |
| AD- | CAUCAAUACCGAAGA | 480 | 6813-6833 | UUCCCATCUUCGGUA | 683 | 6811-6833 |
| 1631176 | UGGGAA | | | UUGAUGAC | | |
| AD- | AUCAAUACCGAAGAU | 481 | 6814-6834 | UUUCCCAUCUUCGGU | 684 | 6812-6834 |
| 1631177 | GGGAAA | | | AUUGAUGA | | |
| AD- | AUACCGAAGAUGGGA | 482 | 6818-6838 | UCUUUUTCCCAUCUU | 685 | 6816-6838 |
| 1631178 | AAAAGA | | | CGGUAUUG | | |
| AD- | UGGGAAAAAGAGACA | 483 | 6828-6848 | UGGGUATGUCUCUU | 686 | 6826-6848 |
| 1631179 | UACCCA | | | UUUCCCAUC | | |
| AD- | GGGAAAAAGAGACAU | 484 | 6829-6849 | UAGGGUAUGUCUCU | 687 | 6827-6849 |
| 1631180 | ACCCUA | | | UUUUCCCAU | | |
| AD- | AAAGAGACAUACCCU | 485 | 6834-6854 | UUUUCUAGGGUAUG | 688 | 6832-6854 |
| 1631181 | AGAAAA | | | UCUCUUUUU | | |
| AD- | CUUGUUUGUAUUGCA | 486 | 6872-6892 | UGGAAUTGCAAUAC | 689 | 6870-6892 |
| 1631182 | AUUCCA | | | AAACAAGUG | | |
| AD- | UUUUCUUUUGGUUGG | 487 | 6918-6938 | UCGGUUCCAACCAAA | 690 | 6916-6938 |
| 1631183 | AACCGA | | | AGAAAAUU | | |
| AD- | UUUCUUUUGGUUGGA | 488 | 6919-6939 | UGCGGUTCCAACCAA | 691 | 6917-6939 |
| 1631184 | ACCGCA | | | AAGAAAAU | | |
| AD- | UUCUUUUGGUUGGAA | 489 | 6920-6940 | UAGCGGTUCCAACCA | 692 | 6918-6940 |
| 1631185 | CCGCUA | | | AAAGAAAA | | |
| AD- | CUUUUGGUUGGAACC | 490 | 6922-6942 | UUCAGCGGUUCCAAC | 693 | 6920-6942 |
| 1631186 | GCUGAA | | | CAAAAGAA | | |
| AD- | CUGCUCCUUUGAAGA | 491 | 6989-7009 | UUAGUATCUUCAAA | 694 | 6987-7009 |
| 1631187 | UACUAA | | | GGAGCAGCU | | |
| AD- | UACUAAAUAUAGGAA | 492 | 7004-7024 | UGACAUTUCCUAUAU | 695 | 7002-7024 |
| 1631188 | AUGUCA | | | UUAGUAUC | | |
| AD- | AUAGGAAAUGUCAGU | 493 | 7012-7032 | UGGAGUACUGACAU | 696 | 7010-7032 |
| 1631189 | ACUCCA | | | UUCCUAUAU | | |
| AD- | CAGUACUCCAUUGAU | 494 | 7023-7043 | UAACACAUCAAUGG | 697 | 7021-7043 |
| 1631190 | GUGUUA | | | AGUACUGAC | | |
| AD- | GAUGUGUUUGAGUGA | 495 | 7035-7055 | UUGGAUTCACUCAAA | 698 | 7033-7055 |
| 1631191 | AUCCAA | | | CACAUCAA | | |
| AD- | AUGUGUUUGAGUGAA | 496 | 7036-7056 | UGUGGATUCACUCAA | 699 | 7034-7056 |
| 1631192 | UCCACA | | | ACACAUCA | | |
| AD- | UUUGAGUGAAUCCAC | 497 | 7041-7061 | UAAUUUGUGGAUUC | 700 | 7039-7061 |
| 1631193 | AAAUUA | | | ACUCAAACA | | |
| AD- | GAGGAUGUGGCACAA | 498 | 7085-7105 | UAAUCUTUGUGCCAC | 701 | 7083-7105 |
| 1631194 | AGAUUA | | | AUCCUCCC | | |
| AD- | UUUUCUCCUUUUCUA | 499 | 7103-7123 | UAUCAUTAGAAAAG | 702 | 7101-7123 |
| 1631195 | AUGAUA | | | GAGAAAAUC | | |
| AD- | UCUAAUGAUUUCACC | 500 | 7114-7134 | UUGAAUGGUGAAAU | 703 | 7112-7134 |
| 1631196 | AUUCAA | | | CAUUAGAAA | | |
| AD- | UAAUGAUUUCACCAU | 501 | 7116-7136 | UUCUGAAUGGUGAA | 704 | 7114-7136 |
| 1631197 | UCAGAA | | | AUCAUUAGA | | |
| AD- | AUUUCACCAUUCAGA | 502 | 7121-7141 | UGAGUUTCUGAAUG | 705 | 7119-7141 |
| 1631198 | AACUCA | | | GUGAAAUCA | | |
| AD- | AUUCAGAAACUCAUU | 503 | 7129-7149 | UGUCUCAAUGAGUU | 706 | 7127-7149 |
| 1631199 | GAGACA | | | UCUGAAUGG | | |
| AD- | GACAAGAACAAGCCA | 504 | 7146-7166 | UACAGUTGGCUUGU | 707 | 7144-7166 |
| 1631200 | ACUGUA | | | UCUUGUCUC | | |
| AD- | AAGAACAAGCCAACU | 505 | 7149-7169 | UAAAACAGUUGGCU | 708 | 7147-7169 |
| 1631201 | GUUUUA | | | UGUUCUUGU | | |
| AD- | UAGCCCUGUUGUGGA | 506 | 7242-7262 | UACACUTCCACAACA | 709 | 7240-7262 |
| 1631202 | AGUGUA | | | GGGCUAUU | | |
| AD- | CUGUUGUGGAAGUGU | 507 | 7247-7267 | UAUCCCACACUUCCA | 710 | 7245-7267 |
| 1631203 | GGGAUA | | | CAACAGGG | | |
| AD- | GUGCACUUUUUAAGG | 508 | 7303-7323 | UACCUCCCUUAAAAA | 711 | 7301-7323 |
| 1631204 | GAGGUA | | | GUGCACGC | | |
| AD- | AAACACAAAAUGUCU | 509 | 7348-7368 | UGAAUAAGACAUUU | 712 | 7346-7368 |
| 1631205 | UAUUCA | | | UGUGUUUUG | | |
| AD- | CAAAAUGUCUUAUUC | 510 | 7353-7373 | UUCCCAGAAUAAGA | 713 | 7351-7373 |
| 1631206 | UGGGAA | | | CAUUUUGUG | | |
| AD- | AGAACACUGCUCUUU | 511 | 7397-7417 | UUAUCCAAAGAGCA | 714 | 7395-7417 |
| 1631207 | GGAUAA | | | GUGUUCUUC | | |
| AD- | UGCUCUUUGGAUAGG | 512 | 7404-7424 | UCAGUUCCUAUCCAA | 715 | 7402-7424 |
| 1631208 | AACUGA | | | AGAGCAGU | | |
| AD- | GCUCUUUGGAUAGGA | 513 | 7405-7425 | UCCAGUTCCUAUCCA | 716 | 7403-7425 |
| 1631209 | ACUGGA | | | AAGAGCAG | | |
| AD- | CCUGGAUCUUUCAAC | 514 | 7443-7463 | UGACGAGUUGAAAG | 717 | 7441-7463 |
| 1631210 | UCGUCA | | | AUCCAGGAG | | |
| AD- | AUUCGGUCAGAGUCA | 515 | 7493-7513 | UCAUCATGACUCUGA | 718 | 7491-7513 |
| 1631211 | UGAUGA | | | CCGAAUUA | | |
| AD- | UAAAAAUGUCAUGCU | 516 | 7533-7553 | UAUACCAGCAUGAC | 719 | 7531-7553 |
| 1631212 | GGUAUA | | | AUUUUUAAG | | |
| AD- | AUGUCAUGCUGGUAU | 517 | 7538-7558 | UGCCCAAUACCAGCA | 720 | 7536-7558 |
| 1631213 | UGGGCA | | | UGACAUUU | | |
| AD- | UGUCAUGCUGGUAUU | 518 | 7539-7559 | UAGCCCAAUACCAGC | 721 | 7537-7559 |
| 1631214 | GGGCUA | | | AUGACAUU | | |
| AD- | GAAAGAGAUACAAUC | 519 | 7593-7613 | UAGCAAGAUUGUAU | 722 | 7591-7613 |
| 1631215 | UUGCUA | | | CUCUUUCUG | | |
| AD- | AUCAAUCUUCCACAU | 520 | 7627-7647 | UACUUCAUGUGGAA | 723 | 7625-7647 |
| 1631216 | GAAGUA | | | GAUUGAUGU | | |
| AD- | CAAUCUUCCACAUGA | 521 | 7629-7649 | UGCACUTCAUGUGGA | 724 | 7627-7649 |
| 1631217 | AGUGCA | | | AGAUUGAU | | |
| AD- | AUAGGAAUUGUCUUU | 522 | 7727-7747 | UUAUCCAAAGACAA | 725 | 7725-7747 |
| 1631218 | GGAUAA | | | UUCCUAUUU | | |
| AD- | UACUAAAAUUUAUAA | 523 | 8005-8025 | UCGGCCTUAUAAAUU | 726 | 8003-8025 |
| 1631219 | GGCCGA | | | UUAGUAUG | | |
| AD- | CUAAAAUUUAUAAGG | 524 | 8007-8027 | UAUCGGCCUUAUAA | 727 | 8005-8027 |
| 1631220 | CCGAUA | | | AUUUUAGUA | | |
| AD- | AAAAUAUUAAGACAG | 525 | 8134-8154 | UGGAAACUGUCUUA | 728 | 8132-8154 |
| 1631221 | UUUCCA | | | AUAUUUUCA | | |

TABLE 5
Modified Sense and Antisense Strand Sequences of Human LRRK2 dsRNA Agents

| | | SEQ | | SEQ | | SEQ |
|---|---|---|---|---|---|---|
| Duplex | Sense Sequence | ID | Antisense Sequence | ID | mRNA Target | ID |
| ID | 5′ to 3′ | NO: | 5′ to 3′ | NO: | Sequence 5′ to 3′ | NO: |
| AD-1631035 | ususuau(Uhd)CfcUfGf | 729 | VPusAfsuaga(Agn)gaguca | 1088 | CCUUUAUUCCUGA | 1447 |
| | AfcucuucuauaL96 | | GfgAfauaaasgsg | | CUCUUCUAUG | |
| AD-1625389 | ususuau(Uhd)ccUfGfAf | 730 | VPusdAsuadGadAgagudC | 1089 | CCUUUAUUCCUGA | 1448 |
| | cucuucuauaL96 | | aGfgaauaaasgsg | | CUCUUCUAUG | |
| AD-1628570 | csusacu(Chd)uaUfGfAf | 731 | VPusdGsucdAadAaugudC | 1090 | UACUACUCUAUGA | 1449 |
| | cauuuugacaL96 | | aUfagaguagsusa | | CAUUUUGACA | |
| AD-1631151 | csasgcu(Ghd)AfaUfUf | 732 | VPusCfsagac(Agn)gacuaa | 1091 | UUCAGCUGAAUUA | 1450 |
| | AfgucugucugaL96 | | UfuCfagcugsasa | | GUCUGUCUGA | |
| AD-1628759 | csasgcu(Ghd)aaUfUfAf | 733 | VPusdCsagdAcdAgacudA | 1092 | UUCAGCUGAAUUA | 1451 |
| | gucugucugaL96 | | aUfucagcugsasa | | GUCUGUCUGA | |
| AD-1631205 | asasaca(Chd)AfaAfAfU | 734 | VPusGfsaaua(Agn)gacauu | 1093 | CAAAACACAAAAU | 1452 |
| | fgucuuauucaL96 | | UfuGfuguuususg | | GUCUUAUUCU | |
| AD-1629524 | asasaca(Chd)aaAfAfUf | 735 | VPusdGsaadTadAgacadTu | 1094 | CAAAACACAAAAU | 1453 |
| | gucuuauucaL96 | | Ufuguguuususg | | GUCUUAUUCU | |
| AD-1631045 | gsuscca(Ahd)CfuCfUf | 736 | VPusAfsaacu(G2p)uuucag | 1095 | AUGUCCAACUCUG | 1454 |
| | GfaaacaguuuaL96 | | AfgUfuggacsasu | | AAACAGUUUA | |
| AD-1631077 | uscscaa(Ahd)GfaAfCfU | 737 | VPusGfsugac(Agn)uguagu | 1096 | UUUCCAAAGAACU | 1455 |
| | facaugucacaL96 | | UfcUfuuggasasa | | ACAUGUCACA | |
| AD-1631109 | csasuuc(Chd)AfaUfAf | 738 | VPusCfsaauc(Tgn)gagaua | 1097 | ACCAUUCCAAUAU | 1456 |
| | UfcucagauugaL96 | | UfuGfgaaugsgsu | | CUCAGAUUGC | |
| AD-1628050 | csasuuc(Chd)aaUfAfUf | 739 | VPusdCsaadTcdTgagadTa | 1098 | ACCAUUCCAAUAU | 1457 |
| | cucagauugaL96 | | Ufuggaaugsgsu | | CUCAGAUUGC | |
| AD-1628073 | csusgcc(Uhd)agAfAfAf | 740 | VPusdAsacdAudAauaudT | 1099 | ACCUGCCUAGAAA | 1458 |
| | uauuauguuaL96 | | uCfuaggcagsgsu | | UAUUAUGUUG | |
| AD-1631135 | gscsugc(Uhd)UfuUfCf | 741 | VPusGfsauac(Agn)guguga | 1100 | GUGCUGCUUUUCA | 1459 |
| | AfcacuguaucaL96 | | AfaAfgcagcsasc | | CACUGUAUCC | |
| AD-1631061 | csuscug(Ghd)AfuGfUf | 742 | VPusGfsuugu(Agn)acugac | 1101 | AUCUCUGGAUGUC | 1460 |
| | CfaguuacaacaL96 | | AfuCfcagagsasu | | AGUUACAACU | |
| AD-1631063 | asgscga(Ghd)CfaUfUf | 743 | VPusAfsgcaa(G2p)guacaa | 1102 | GCAGCGAGCAUUG | 1461 |
| | GfuaccuugcuaL96 | | UfgCfucgcusgsc | | UACCUUGCUG | |
| AD-1631093 | csascau(Uhd)GfaUfUfC | 744 | VPusUfsccau(G2p)agagaa | 1103 | ACCACAUUGAUUC | 1462 |
| | fucucauggaaL96 | | UfcAfaugugsgsu | | UCUCAUGGAA | |
| AD-1631190 | csasgua(Chd)UfcCfAfU | 745 | VPusAfsacac(Agn)ucaaug | 1104 | GUCAGUACUCCAU | 1463 |
| | fugauguguuaL96 | | GfaGfuacugsasc | | UGAUGUGUUU | |
| AD-1631196 | uscsuaa(Uhd)GfaUfUf | 746 | VPusUfsgaau(G2p)gugaaa | 1105 | UUUCUAAUGAUUU | 1464 |
| | UfcaccauucaaL96 | | UfcAfuuagasasa | | CACCAUUCAG | |
| AD-1629292 | csusaau(Ghd)auUfUfCf | 747 | VPusdCsugdAadTggugdA | 1106 | UUCUAAUGAUUUC | 1465 |
| | accauucagaL96 | | aAfucauuagsasa | | ACCAUUCAGA | |
| AD-1629304 | cscsauu(Chd)agAfAfAf | 748 | VPusdCsucdAadTgagudT | 1107 | CACCAUUCAGAAA | 1466 |
| | cucauugagaL96 | | uCfugaauggsusg | | CUCAUUGAGA | |
| AD-1631210 | cscsugg(Ahd)UfcUfUf | 749 | VPusGfsacga(G2p)uugaaa | 1108 | CUCCUGGAUCUUU | 1467 |
| | UfcaacucgucaL96 | | GfaUfccaggsasg | | CAACUCGUCG | |
| AD-1629619 | cscsugg(Ahd)ucUfUfUf | 750 | VPusdGsacdGadGuugadA | 1109 | CUCCUGGAUCUUU | 1468 |
| | caacucgucaL96 | | aGfauccaggsasg | | CAACUCGUCG | |
| AD-1631216 | asuscaa(Uhd)CfuUfCfC | 751 | VPusAfscuuc(Agn)ugugga | 1110 | ACAUCAAUCUUCC | 1469 |
| | facaugaaguaL96 | | AfgAfuugausgsu | | ACAUGAAGUG | |
| AD-1631042 | csuscuc(Ghd)AfaAfUf | 752 | VPusGfsucca(Agn)ugucau | 1111 | GUCUCUCGAAAUG | 1470 |
| | GfacauuggacaL96 | | UfuCfgagagsasc | | ACAUUGGACC | |
| AD-1625910 | csuscuc(Ghd)aaAfUfGf | 753 | VPusdGsucdCadAugucdA | 1112 | GUCUCUCGAAAUG | 1471 |
| | acauuggacaL96 | | uUfucgagagsasc | | ACAUUGGACC | |
| AD-1626273 | uscscac(Ahd)cuUfGfCf | 754 | VPusdCsuadAadGaccgdC | 1113 | CUUCCACACUUGC | 1472 |
| | ggucuuuagaL96 | | aAfguguggasasg | | GGUCUUUAGA | |
| AD-1626353 | usasagg(Ghd)aaCfUfCf | 755 | VPusdGscudAadAuaagdA | 1114 | CUUAAGGGAACUC | 1473 |
| | uuauuuagcaL96 | | gUfucccuuasasg | | UUAUUUAGCC | |
| AD-1626428 | usasgag(Ahd)aaCfUfGf | 756 | VPusdAsgadAadGaugcdA | 1115 | AGUAGAGAAACUG | 1474 |
| | caucuuucuaL96 | | gUfuucucuascsu | | CAUCUUUCUC | |
| AD-1631060 | asasaau(Chd)UfgAfCfA | 757 | VPusAfsucca(G2p)agaugu | 1116 | UGAAAAUCUGACA | 1475 |
| | fucucuggauaL96 | | CfaGfauuuuscsa | | UCUCUGGAUG | |
| AD-1631078 | csusaga(Ahd)AfaAfUf | 758 | VPusGfscaau(C2p)uggaau | 1117 | UCCUAGAAAAAUU | 1476 |
| | UfccagauugcaL96 | | UfuUfucuagsgsa | | CCAGAUUGCU | |
| AD-1627511 | csusaga(Ahd)aaAfUfUf | 759 | VPusdGscadAudCuggadA | 1118 | UCCUAGAAAAAUU | 1477 |
| | ccagauugcaL96 | | uUfuuucuagsgsa | | CCAGAUUGCU | |
| AD-1627672 | ususgag(Ahd)uuUfCfAf | 760 | VPusdCsaudGudAaggudG | 1119 | ACUUGAGAUUUCA | 1478 |
| | ccuuacaugaL96 | | aAfaucucaasgsu | | CCUUACAUGC | |
| AD-1631100 | gsasagg(Ahd)GfaUfCf | 761 | VPusUfsuuac(Tgn)aagaga | 1120 | AGGAAGGAGAUCU | 1479 |
| | UfcuuaguaaaaL96 | | UfcUfccuucscsu | | CUUAGUAAAU | |
| AD-1631101 | asgsgag(Ahd)UfcUfCf | 762 | VPusGfsauuu(Agn)cuaaga | 1121 | GAAGGAGAUCUCU | 1480 |
| | UfuaguaaaucaL96 | | GfaUfcuccususc | | UAGUAAAUCC | |
| AD-1631111 | ususcca(Ahd)UfaUfCf | 763 | VPusGfsgcaa(Tgn)cugaga | 1122 | CAUUCCAAUAUCU | 1481 |
| | UfcagauugccaL96 | | UfaUfuggaasusg | | CAGAUUGCCC | |
| AD-1628052 | ususcca(Ahd)uaUfCfUf | 764 | VPusdGsgcdAadTcugadG | 1123 | CAUUCCAAUAUCU | 1482 |
| | cagauugccaL96 | | aUfauuggaasusg | | CAGAUUGCCC | |
| AD-1631117 | cscsaga(Ghd)UfuUfCf | 765 | VPusUfscacc(Tgn)aggaga | 1124 | CUCCAGAGUUUCU | 1483 |
| | UfccuaggugaaL96 | | AfaCfucuggsasg | | CCUAGGUGAU | |
| AD-1629214 | asasugu(Chd)agUfAfCf | 766 | VPusdAsucdAadTggagdT | 1125 | GAAAUGUCAGUAC | 1484 |
| | uccauugauaL96 | | aCfugacauususc | | UCCAUUGAUG | |
| AD-1631193 | ususuga(Ghd)UfgAfAf | 767 | VPusAfsauuu(G2p)uggauu | 1126 | UGUUUGAGUGAA | 1485 |
| | UfccacaaauuaL96 | | CfaCfucaaascsa | | UCCACAAAUUC | |
| AD-1631195 | ususuuc(Uhd)CfcUfUf | 768 | VPusAfsucau(Tgn)agaaaa | 1127 | GAUUUUCUCCUUU | 1486 |
| | UfucuaaugauaL96 | | GfgAfgaaaasusc | | UCUAAUGAUU | |
| AD-1629280 | ususuuc(Uhd)ccUfUfUf | 769 | VPusdAsucdAudTagaadA | 1128 | GAUUUUCUCCUUU | 1487 |
| | ucuaaugauaL96 | | aGfgagaaaasusc | | UCUAAUGAUU | |
| AD-1631197 | usasaug(Ahd)UfuUfCf | 770 | VPusUfscuga(Agn)ugguga | 1129 | UCUAAUGAUUUCA | 1488 |
| | AfccauucagaaL96 | | AfaUfcauuasgsa | | CCAUUCAGAA | |
| AD-1631198 | asusuuc(Ahd)CfcAfUf | 771 | VPusGfsaguu(Tgn)cugaau | 1130 | UGAUUUCACCAUU | 1489 |
| | UfcagaaacucaL96 | | GfgUfgaaauscsa | | CAGAAACUCA | |
| AD-1629298 | asusuuc(Ahd)ccAfUfUf | 772 | VPusdGsagdTudTcugadA | 1131 | UGAUUUCACCAUU | 1490 |
| | cagaaacucaL96 | | uGfgugaaauscsa | | CAGAAACUCA | |
| AD-1631201 | asasgaa(Chd)AfaGfCfC | 773 | VPusAfsaaac(Agn)guuggc | 1132 | ACAAGAACAAGCC | 1491 |
| | faacuguuuuaL96 | | UfuGfuucuusgsu | | AACUGUUUUC | |
| AD-1629620 | csusgga(Uhd)cuUfUfCf | 774 | VPusdCsgadCgdAguugdA | 1133 | UCCUGGAUCUUUC | 1492 |
| | aacucgucgaL96 | | aAfgauccagsgsa | | AACUCGUCGA | |
| AD-1631026 | gsusuuc(Chd)AfgCfUf | 775 | VPusAfsaucg(G2p)uauaag | 1134 | UGGUUUCCAGCUU | 1493 |
| | UfauaccgauuaL96 | | CfuGfgaaacscsa | | AUACCGAUUU | |
| AD-1631027 | ususcua(Ahd)AfcCfUf | 776 | VPusCfsuugc(Agn)acagag | 1135 | GUUUCUAAACCUC | 1494 |
| | CfuguugcaagaL96 | | GfuUfuagaasasc | | UGUUGCAAGU | |
| AD-1631028 | asasccu(Chd)UfgUfUf | 777 | VPusAfsaaca(C2p)uugcaa | 1136 | UAAACCUCUGUUG | 1495 |
| | GfcaaguguuuaL96 | | CfaGfagguususa | | CAAGUGUUUU | |
| AD-1624856 | asasccu(Chd)ugUfUfGf | 778 | VPusdAsaadCadCuugcdA | 1137 | UAAACCUCUGUUG | 1496 |
| | caaguguuuaL96 | | aCfagagguususa | | CAAGUGUUUU | |
| AD-1631041 | asgscuu(Uhd)CfcAfCf | 779 | VPusCfsauag(C2p)uguugu | 1138 | CGAGCUUUCCACA | 1497 |
| | AfacagcuaugaL96 | | GfgAfaagcuscsg | | ACAGCUAUGU | |
| AD-1631051 | ususaaa(Uhd)CfuUfCfC | 780 | VPusCfsgcaa(G2p)ugugga | 1139 | UUUUAAAUCUUCC | 1498 |
| | facacuugcgaL96 | | AfgAfuuuaasasa | | ACACUUGCGG | |
| AD-1626265 | ususaaa(Uhd)cuUfCfCf | 781 | VPusdCsgcdAadGugugdG | 1140 | UUUUAAAUCUUCC | 1499 |
| | acacuugcgaL96 | | aAfgauuuaasasa | | ACACUUGCGG | |
| AD-1631057 | asascuc(Uhd)UfaUfUf | 782 | VPusAfsuuau(G2p)gcuaaa | 1141 | GGAACUCUUAUUU | 1500 |
| | UfagccauaauaL96 | | UfaAfgaguuscsc | | AGCCAUAAUC | |
| AD-1631082 | gsasgau(Uhd)UfcAfCf | 783 | VPusAfsgcau(G2p)uaaggu | 1142 | UUGAGAUUUCACC | 1501 |
| | CfuuacaugcuaL96 | | GfaAfaucucsasa | | UUACAUGCUU | |
| AD-1631110 | asusucc(Ahd)AfuAfUf | 784 | VPusGfscaau(C2p)ugagau | 1143 | CCAUUCCAAUAUC | 1502 |
| | CfucagauugcaL96 | | AfuUfggaausgsg | | UCAGAUUGCC | |
| AD-1631136 | csusgcu(Uhd)UfuCfAf | 785 | VPusGfsgaua(C2p)agugug | 1144 | UGCUGCUUUUCAC | 1503 |
| | CfacuguauccaL96 | | AfaAfagcagscsa | | ACUGUAUCCC | |
| AD-1628754 | gsasauu(Chd)agCfUfGf | 786 | VPusdAsgadCudAauucdA | 1145 | UUGAAUUCAGCUG | 1504 |
| | aauuagucuaL96 | | gCfugaauucsasa | | AAUUAGUCUG | |
| AD-1628794 | ascscua(Ahd)aaAfCfGf | 787 | VPusdCsaadCadAuuacdG | 1146 | UUACCUAAAAACG | 1505 |
| | uaauuguugaL96 | | uUfuuuaggusasa | | UAAUUGUUGA | |
| AD-1629216 | usgsuca(Ghd)uaCfUfCf | 788 | VPusdAscadTcdAauggdA | 1147 | AAUGUCAGUACUC | 1506 |
| | cauugauguaL96 | | gUfacugacasusu | | CAUUGAUGUG | |
| AD-1631199 | asusuca(Ghd)AfaAfCf | 789 | VPusGfsucuc(Agn)augagu | 1148 | CCAUUCAGAAACU | 1507 |
| | UfcauugagacaL96 | | UfuCfugaausgsg | | CAUUGAGACA | |
| AD-1629621 | usgsgau(Chd)uuUfCfAf | 790 | VPusdTscgdAcdGaguudG | 1149 | CCUGGAUCUUUCA | 1508 |
| | acucgucgaaL96 | | aAfagauccasgsg | | ACUCGUCGAC | |
| AD-1629809 | csasuga(Ahd)guGfCfAf | 791 | VPusdTscudAadAuuuudG | 1150 | CACAUGAAGUGCA | 1509 |
| | aaauuuagaaL96 | | cAfcuucaugsusg | | AAAUUUAGAA | |
| AD-1624739 | asgscaa(Uhd)ccUfCfAf | 792 | VPusdCsugdAcdAauuudG | 1151 | UUAGCAAUCCUCA | 1510 |
| | aauugucagaL96 | | aGfgauugcusasa | | AAUUGUCAGC | |
| AD-1631029 | ascscuc(Uhd)GfuUfGf | 793 | VPusAfsaaac(Agn)cuugca | 1152 | AAACCUCUGUUGC | 1511 |
| | CfaaguguuuuaL96 | | AfcAfgaggususu | | AAGUGUUUUG | |
| AD-1624857 | ascscuc(Uhd)guUfGfCf | 794 | VPusdAsaadAcdAcuugdC | 1153 | AAACCUCUGUUGC | 1512 |
| | aaguguuuuaL96 | | aAfcagaggususu | | AAGUGUUUUG | |
| AD-1625209 | ususggc(Uhd)ugGfUfCf | 795 | VPusdGsaadAudAaaggdA | 1154 | UCUUGGCUUGGUC | 1513 |
| | cuuuauuucaL96 | | cCfaagccaasgsa | | CUUUAUUUCC | |
| AD-1625230 | gsasuaa(Ghd)acUfUfCf | 796 | VPusdCsuudAadAuuagdA | 1155 | CAGAUAAGACUUC | 1514 |
| | uaauuuaagaL96 | | aGfucuuaucsusg | | UAAUUUAAGG | |
| AD-1631043 | uscsucg(Ahd)AfaUfGf | 797 | VPusGfsgucc(Agn)auguca | 1156 | UCUCUCGAAAUGA | 1515 |
| | AfcauuggaccaL96 | | UfuUfcgagasgsa | | CAUUGGACCC | |
| AD-1631046 | gsasaac(Ahd)GfuUfUf | 798 | VPusAfsugac(Agn)gguuaa | 1157 | CUGAAACAGUUUA | 1516 |
| | AfaccugucauaL96 | | AfcUfguuucsasg | | ACCUGUCAUA | |
| AD-1631019 | asgsaag(Chd)AfuAfUf | 799 | VPusAfsggag(Agn)auguau | 1158 | GCAGAAGCAUAUA | 1517 |
| | AfcauucuccuaL96 | | AfuGfcuucusgsc | | CAUUCUCCUG | |
| AD-1624178 | asgsaag(Chd)auAfUfAf | 800 | VPusdAsggdAgdAaugudA | 1159 | GCAGAAGCAUAUA | 1518 |
| | cauucuccuaL96 | | uAfugcuucusgsc | | CAUUCUCCUG | |
| AD-1626183 | ususgcu(Ghd)cuAfUfGf | 801 | VPusdCsaadGadAaggcdA | 1160 | UCUUGCUGCUAUG | 1519 |
| | ccuuucuugaL96 | | uAfgcagcaasgsa | | CCUUUCUUGC | |
| AD-1626375 | usasauc(Ahd)gaUfCfAf | 802 | VPusdCscadAgdAugcudG | 1161 | CAUAAUCAGAUCA | 1520 |
| | gcaucuuggaL96 | | aUfcugauuasusg | | GCAUCUUGGA | |
| AD-1631080 | csuscug(Ahd)AfaUfUf | 803 | VPusGfsucgg(Agn)ugauaa | 1162 | AACUCUGAAAUUA | 1521 |
| | AfucauccgacaL96 | | UfuUfcagagsusu | | UCAUCCGACU | |
| AD-1631102 | gsgsaga(Uhd)CfuCfUf | 804 | VPusGfsgauu(Tgn)acuaag | 1163 | AAGGAGAUCUCUU | 1522 |
| | UfaguaaauccaL96 | | AfgAfucuccsusu | | AGUAAAUCCA | |
| AD-1631103 | asgsauc(Uhd)CfuUfAf | 805 | VPusCfsugga(Tgn)uuacua | 1164 | GGAGAUCUCUUAG | 1523 |
| | GfuaaauccagaL96 | | AfgAfgaucuscsc | | UAAAUCCAGA | |
| AD-1628014 | asgsauc(Uhd)cuUfAfGf | 806 | VPusdCsugdGadTuuacdTa | 1165 | GGAGAUCUCUUAG | 1524 |
| | uaaauccagaL96 | | Afgagaucuscsc | | UAAAUCCAGA | |
| AD-1631108 | asgsgcu(Chd)AfcCfAf | 807 | VPusGfsauau(Tgn)ggaaug | 1166 | CAAGGCUCACCAU | 1525 |
| | UfuccaauaucaL96 | | GfuGfagccususg | | UCCAAUAUCU | |
| AD-1628042 | asgsgcu(Chd)acCfAfUf | 808 | VPusdGsaudAudTggaadT | 1167 | CAAGGCUCACCAU | 1526 |
| | uccaauaucaL96 | | gGfugagccususg | | UCCAAUAUCU | |
| AD-1628043 | gsgscuc(Ahd)ccAfUfUf | 809 | VPusdAsgadTadTuggadA | 1168 | AAGGCUCACCAUU | 1527 |
| | ccaauaucuaL96 | | uGfgugagccsusu | | CCAAUAUCUC | |
| AD-1628044 | gscsuca(Chd)caUfUfCf | 810 | VPusdGsagdAudAuuggdA | 1169 | AGGCUCACCAUUC | 1528 |
| | caauaucucaL96 | | aUfggugagcscsu | | CAAUAUCUCA | |
| AD-1628383 | uscsagc(Chd)auGfAfUf | 811 | VPusdCsggdTadTauaadTc | 1170 | ACUCAGCCAUGAU | 1529 |
| | uauauaccgaL96 | | Afuggcugasgsu | | UAUAUACCGA | |
| AD-1631134 | csasaug(Uhd)GfcUfGf | 812 | VPusGfsugug(Agn)aaagca | 1171 | CACAAUGUGCUGC | 1530 |
| | CfuuuucacacaL96 | | GfcAfcauugsusg | | UUUUCACACU | |
| AD-1628412 | uscsaca(Chd)ugUfAfUf | 813 | VPusdAsgcdAudTgggadT | 1172 | UUUCACACUGUAU | 1531 |
| | cccaaugcuaL96 | | aCfagugugasasa | | CCCAAUGCUG | |
| AD-1631145 | gscsuca(Ghd)UfaCfUf | 814 | VPusAfsuucu(Agn)cagcag | 1173 | UUGCUCAGUACUG | 1532 |
| | GfcuguagaauaL96 | | UfaCfugagcsasa | | CUGUAGAAUG | |
| AD-1631147 | uscsagu(Ahd)CfuGfCf | 815 | VPusCfscauu(C2p)uacagc | 1174 | GCUCAGUACUGCU | 1533 |
| | UfguagaauggaL96 | | AfgUfacugasgsc | | GUAGAAUGGG | |
| AD-1628467 | uscsagu(Ahd)cuGfCfUf | 816 | VPusdCscadTudCuacadGc | 1175 | GCUCAGUACUGCU | 1534 |
| | guagaauggaL96 | | Afguacugasgsc | | GUAGAAUGGG | |
| AD-1631150 | ususuga(Chd)AfuUfUf | 817 | VPusGfscuga(Agn)uucaaa | 1176 | UCUUUGACAUUUU | 1535 |
| | UfgaauucagcaL96 | | AfuGfucaaasgsa | | GAAUUCAGCU | |
| AD-1631152 | gscsuga(Ahd)UfuAfGf | 818 | VPusGfsucag(Agn)cagacu | 1177 | CAGCUGAAUUAGU | 1536 |
| | UfcugucugacaL96 | | AfaUfucagcsusg | | CUGUCUGACG | |
| AD-1631173 | gsgsuca(Uhd)CfaAfUf | 819 | VPusCfsaucu(Tgn)cgguau | 1178 | CUGGUCAUCAAUA | 1537 |
| | AfccgaagaugaL96 | | UfgAfugaccsasg | | CCGAAGAUGG | |
| AD-1629031 | gsgsuca(Uhd)caAfUfAf | 820 | VPusdCsaudCudTcggudA | 1179 | CUGGUCAUCAAUA | 1538 |
| | ccgaagaugaL96 | | uUfgaugaccsasg | | CCGAAGAUGG | |
| AD-1631187 | csusgcu(Chd)CfuUfUf | 821 | VPusUfsagua(Tgn)cuucaa | 1180 | AGCUGCUCCUUUG | 1539 |
| | GfaagauacuaaL96 | | AfgGfagcagscsu | | AAGAUACUAA | |
| AD-1631217 | csasauc(Uhd)UfcCfAfC | 822 | VPusGfscacu(Tgn)caugug | 1181 | AUCAAUCUUCCAC | 1540 |
| | faugaagugcaL96 | | GfaAfgauugsasu | | AUGAAGUGCA | |
| AD-1629799 | csasauc(Uhd)ucCfAfCf | 823 | VPusdGscadCudTcaugdTg | 1182 | AUCAAUCUUCCAC | 1541 |
| | augaagugcaL96 | | Gfaagauugsasu | | AUGAAGUGCA | |
| AD-1631025 | gsgsguu(Uhd)AfaGfUf | 824 | VPusAfsuccu(Agn)uaagac | 1183 | CUGGGUUUAAGUC | 1542 |
| | CfuuauaggauaL96 | | UfuAfaacccsasg | | UUAUAGGAUA | |
| AD-1624595 | gsgsguu(Uhd)aaGfUfCf | 825 | VPusdAsucdCudAuaagdA | 1184 | CUGGGUUUAAGUC | 1543 |
| | uuauaggauaL96 | | cUfuaaacccsasg | | UUAUAGGAUA | |
| AD-1631030 | uscsucg(Uhd)GfaAfCf | 826 | VPusCfsguac(Agn)ucuugu | 1185 | GAUCUCGUGAACA | 1544 |
| | AfagauguacgaL96 | | UfcAfcgagasusc | | AGAUGUACGA | |
| AD-1625057 | uscsucg(Uhd)gaAfCfAf | 827 | VPusdCsgudAcdAucuudG | 1186 | GAUCUCGUGAACA | 1545 |
| | agauguacgaL96 | | uUfcacgagasusc | | AGAUGUACGA | |
| AD-1631032 | asgsgaa(Ahd)AfgUfUf | 828 | VPusAfsagaa(G2p)guucaa | 1187 | AUAGGAAAAGUU | 1546 |
| | GfaaccuucuuaL96 | | CfuUfuuccusasu | | GAACCUUCUUG | |
| AD-1625191 | asgsgaa(Ahd)agUfUfGf | 829 | VPusdAsagdAadGguucdA | 1188 | AUAGGAAAAGUU | 1547 |
| | aaccuucuuaL96 | | aCfuuuuccusasu | | GAACCUUCUUG | |
| AD-1625192 | gsgsaaa(Ahd)guUfGfAf | 830 | VPusdCsaadGadAgguudC | 1189 | UAGGAAAAGUUG | 1548 |
| | accuucuugaL96 | | aAfcuuuuccsusa | | AACCUUCUUGG | |
| AD-1631033 | asasagu(Uhd)GfaAfCfC | 831 | VPusAfsgcca(Agn)gaaggu | 1190 | GAAAAGUUGAACC | 1549 |
| | fuucuuggcuaL96 | | UfcAfacuuususc | | UUCUUGGCUU | |
| AD-1625195 | asasagu(Uhd)gaAfCfCf | 832 | VPusdAsgcdCadAgaagdG | 1191 | GAAAAGUUGAACC | 1550 |
| | uucuuggcuaL96 | | uUfcaacuuususc | | UUCUUGGCUU | |
| AD-1625485 | ususagu(Ghd)uaGfGfAf | 833 | VPusdGsuadAadAuucudC | 1192 | AAUUAGUGUAGG | 1551 |
| | gaauuuuacaL96 | | cUfacacuaasusu | | AGAAUUUUACC | |
| AD-1625610 | asasacu(Uhd)caAfUfCf | 834 | VPusdCsucdAudAugggdA | 1193 | CAAAACUUCAAUC | 1552 |
| | ccauaugagaL96 | | uUfgaaguuususg | | CCAUAUGAGG | |
| AD-1631038 | csasgca(Uhd)UfuCfUf | 835 | VPusAfsagcc(Agn)gagaag | 1194 | GACAGCAUUUCUU | 1553 |
| | UfcucuggcuuaL96 | | AfaAfugcugsusc | | CUCUGGCUUC | |
| AD-1624152 | ascsacc(Uhd)gaAfUfGf | 836 | VPusdAscudCcdAaaacdA | 1195 | AUACACCUGAAUG | 1554 |
| | uuuuggaguaL96 | | uUfcaggugusasu | | UUUUGGAGUU | |
| AD-1631044 | cscsuca(Ghd)UfgGfUf | 837 | VPusAfsggau(C2p)uaaaac | 1196 | ACCCUCAGUGGUU | 1555 |
| | UfuuagauccuaL96 | | CfaCfugaggsgsu | | UUAGAUCCUA | |
| AD-1631020 | gscsaua(Uhd)AfcAfUf | 838 | VPusCfsuuca(G2p)gagaau | 1197 | AAGCAUAUACAUU | 1556 |
| | UfcuccugaagaL96 | | GfuAfuaugcsusu | | CUCCUGAAGU | |
| AD-1631056 | gsasacu(Uhd)AfaGfGf | 839 | VPusAfsuaag(Agn)guuccc | 1198 | UUGAACUUAAGGG | 1557 |
| | GfaacucuuauaL96 | | UfuAfaguucsasa | | AACUCUUAUU | |
| AD-1631059 | uscsagc(Ahd)UfcUfUf | 840 | VPusAfscuca(Agn)guccaa | 1199 | GAUCAGCAUCUUG | 1558 |
| | GfgacuugaguaL96 | | GfaUfgcugasusc | | GACUUGAGUG | |
| AD-1631062 | usgsgaa(Chd)UfaAfGf | 841 | VPusGfsggaa(Agn)ggaucu | 1200 | CUUGGAACUAAGA | 1559 |
| | AfuccuuucccaL96 | | UfaGfuuccasasg | | UCCUUUCCCA | |
| AD-1626524 | usgsgaa(Chd)uaAfGfAf | 842 | VPusdGsggdAadAggaudC | 1201 | CUUGGAACUAAGA | 1560 |
| | uccuuucccaL96 | | uUfaguuccasasg | | UCCUUUCCCA | |
| AD-1627632 | ususucc(Ahd)auGfGfGf | 843 | VPusdGsacdCadAaaucdCc | 1202 | AUUUUCCAAUGGG | 1561 |
| | auuuuggucaL96 | | Afuuggaaasasu | | AUUUUGGUCA | |
| AD-1631087 | usgsaag(Chd)UfuAfUf | 844 | VPusCfsuacc(Agn)gacaau | 1203 | CCUGAAGCUUAUU | 1562 |
| | UfgucugguagaL96 | | AfaGfcuucasgsg | | GUCUGGUAGG | |
| AD-1627766 | usgsaag(Chd)uuAfUfUf | 845 | VPusdCsuadCcdAgacadA | 1204 | CCUGAAGCUUAUU | 1563 |
| | gucugguagaL96 | | uAfagcuucasgsg | | GUCUGGUAGG | |
| AD-1628008 | gsgsaag(Ghd)agAfUfCf | 846 | VPusdTsuadCudAagagdA | 1205 | GAGGAAGGAGAUC | 1564 |
| | ucuuaguaaaL96 | | uCfuccuuccsusc | | UCUUAGUAAA | |
| AD-1631104 | asgsuaa(Ahd)UfcCfAf | 847 | VPusUfsuggu(Tgn)gaucug | 1206 | UUAGUAAAUCCAG | 1565 |
| | GfaucaaccaaaL96 | | GfaUfuuacusasa | | AUCAACCAAG | |
| AD-1631116 | gscsucc(Ahd)GfaGfUf | 848 | VPusCfscuag(G2p)agaaac | 1207 | AAGCUCCAGAGUU | 1566 |
| | UfucuccuaggaL96 | | UfcUfggagcsusu | | UCUCCUAGGU | |
| AD-1631129 | cscsuca(Chd)UfaGfAfA | 849 | VPusGfscugu(Agn)ggguuc | 1208 | AGCCUCACUAGAA | 1567 |
| | fcccuacagcaL96 | | UfaGfugaggscsu | | CCCUACAGCA | |
| AD-1631130 | csusgau(Ghd)GfuUfUf | 350 | VPusGfsaggu(Agn)ucucaa | 1209 | AGCUGAUGGUUUG | 1568 |
| | GfagauaccucaL96 | | AfcCfaucagscsu | | AGAUACCUCC | |
| AD-1631133 | csasgcc(Ahd)UfgAfUf | 851 | VPusUfscggu(Agn)uauaau | 1210 | CUCAGCCAUGAUU | 1569 |
| | UfauauaccgaaL96 | | CfaUfggcugsasg | | AUAUACCGAG | |
| AD-1631139 | usgscaa(Ahd)GfaUfUf | 852 | VPusCfsguag(Tgn)cagcaa | 1211 | AUUGCAAAGAUUG | 1570 |
| | GfcugacuacgaL96 | | UfcUfuugcasasu | | CUGACUACGG | |
| AD-1631153 | csusgaa(Uhd)UfaGfUf | 853 | VPusCfsguca(G2p)acagac | 1212 | AGCUGAAUUAGUC | 1571 |
| | CfugucugacgaL96 | | UfaAfuucagscsu | | UGUCUGACGA | |
| AD-1628883 | gsasgga(Chd)agCfUfCf | 854 | VPusdAsagdAadAugagdA | 1213 | CAGAGGACAGCUC | 1572 |
| | ucauuucuuaL96 | | gCfuguccucsusg | | UCAUUUCUUG | |
| AD-1631170 | uscscug(Ghd)UfcAfUf | 855 | VPusUfsucgg(Tgn)auugau | 1214 | UCUCCUGGUCAUC | 1573 |
| | CfaauaccgaaaL96 | | GfaCfcaggasgsa | | AAUACCGAAG | |
| AD-1631189 | asusagg(Ahd)AfaUfGf | 856 | VPusGfsgagu(Agn)cugaca | 1215 | AUAUAGGAAAUG | 1574 |
| | UfcaguacuccaL96 | | UfuUfccuausasu | | UCAGUACUCCA | |
| AD-1629224 | csuscca(Uhd)ugAfUfGf | 857 | VPusdAscudCadAacacdA | 1216 | UACUCCAUUGAUG | 1575 |
| | uguuugaguaL96 | | uCfaauggagsusa | | UGUUUGAGUG | |
| AD-1631192 | asusgug(Uhd)UfuGfAf | 858 | VPusGfsugga(Tgn)ucacuc | 1217 | UGAUGUGUUUGA | 1576 |
| | GfugaauccacaL96 | | AfaAfcacauscsa | | GUGAAUCCACA | |
| AD-1631200 | gsascaa(Ghd)AfaCfAfA | 859 | VPusAfscagu(Tgn)ggcuug | 1218 | GAGACAAGAACAA | 1577 |
| | fgccaacuguaL96 | | UfuCfuugucsusc | | GCCAACUGUU | |
| AD-1631207 | asgsaac(Ahd)CfuGfCfU | 860 | VPusUfsaucc(Agn)aagagc | 1219 | GAAGAACACUGCU | 1578 |
| | fcuuuggauaaL96 | | AfgUfguucususc | | CUUUGGAUAG | |
| AD-1629573 | asgsaac(Ahd)cuGfCfUf | 861 | VPusdTsaudCcdAaagadGc | 1220 | GAAGAACACUGCU | 1579 |
| | cuuuggauaaL96 | | Afguguucususc | | CUUUGGAUAG | |
| AD-1629807 | csascau(Ghd)aaGfUfGf | 862 | VPusdTsaadAudTuugcdA | 1221 | UCCACAUGAAGUG | 1580 |
| | caaaauuuaaL96 | | cUfucaugugsgsa | | CAAAAUUUAG | |
| AD-1631218 | asusagg(Ahd)AfuUfGf | 863 | VPusUfsaucc(Agn)aagaca | 1222 | AAAUAGGAAUUG | 1581 |
| | UfcuuuggauaaL96 | | AfuUfccuaususu | | UCUUUGGAUAG | |
| AD-1629876 | asusagg(Ahd)auUfGfUf | 864 | VPusdTsaudCcdAaagadCa | 1223 | AAAUAGGAAUUG | 1582 |
| | cuuuggauaaL96 | | Afuuccuaususu | | UCUUUGGAUAG | |
| AD-1631023 | uscsaca(Chd)AfcUfGfC | 865 | VPusGfsauac(Agn)ucugca | 1224 | CUUCACACACUGC | 1583 |
| | fagauguaucaL96 | | GfuGfugugasasg | | AGAUGUAUCC | |
| AD-1631024 | usgsucu(Ghd)GfgUfUf | 866 | VPusAfsuaag(Agn)cuuaaa | 1225 | AGUGUCUGGGUUU | 1584 |
| | UfaagucuuauaL96 | | CfcCfagacascsu | | AAGUCUUAUA | |
| AD-1624721 | asgsgau(Uhd)ucAfGfAf | 867 | VPusdCsuadAgdAuugudC | 1226 | AAAGGAUUUCAGA | 1585 |
| | caaucuuagaL96 | | uGfaaauccususu | | CAAUCUUAGC | |
| AD-1625501 | ususacc(Ghd)agAfUfGf | 868 | VPusdGsuadAudAcggcdA | 1227 | UUUUACCGAGAUG | 1586 |
| | ccguauuacaL96 | | uCfucgguaasasa | | CCGUAUUACA | |
| AD-1625928 | ascsccu(Chd)agUfGfGf | 869 | VPusdGsaudCudAaaacdC | 1228 | GGACCCUCAGUGG | 1587 |
| | uuuuagaucaL96 | | aCfugaggguscsc | | UUUUAGAUCC | |
| AD-1631047 | asgsuuu(Ahd)AfcCfUf | 870 | VPusGfsuuau(Agn)ugacag | 1229 | ACAGUUUAACCUG | 1588 |
| | GfucauauaacaL96 | | GfuUfaaacusgsu | | UCAUAUAACC | |
| AD-1625975 | asgsuuu(Ahd)acCfUfGf | 871 | VPusdGsuudAudAugacdA | 1230 | ACAGUUUAACCUG | 1589 |
| | ucauauaacaL96 | | gGfuuaaacusgsu | | UCAUAUAACC | |
| AD-1626184 | usgscug(Chd)uaUfGfCf | 872 | VPusdGscadAgdAaaggdC | 1231 | CUUGCUGCUAUGC | 1590 |
| | cuuucuugcaL96 | | aUfagcagcasasg | | CUUUCUUGCC | |
| AD-1631050 | csusgcu(Ahd)UfgCfCf | 873 | VPusAfsggca(Agn)gaaagg | 1232 | UGCUGCUAUGCCU | 1591 |
| | UfuucuugccuaL96 | | CfaUfagcagscsa | | UUCUUGCCUC | |
| AD-1626266 | usasaau(Chd)uuCfCfAf | 874 | VPusdCscgdCadAgugudG | 1233 | UUUAAAUCUUCCA | 1592 |
| | cacuugcggaL96 | | gAfagauuuasasa | | CACUUGCGGU | |
| AD-1626349 | asascuu(Ahd)agGfGfAf | 875 | VPusdAsaudAadGaguudC | 1234 | UGAACUUAAGGGA | 1593 |
| | acucuuauuaL96 | | cCfuuaaguuscsa | | ACUCUUAUUU | |
| AD-1631058 | asuscag(Chd)AfuCfUf | 876 | VPusCfsucaa(G2p)uccaag | 1235 | AGAUCAGCAUCUU | 1594 |
| | UfggacuugagaL96 | | AfuGfcugauscsu | | GGACUUGAGU | |
| AD-1626382 | asuscag(Chd)auCfUfUf | 877 | VPusdCsucdAadGuccadA | 1236 | AGAUCAGCAUCUU | 1595 |
| | ggacuugagaL96 | | gAfugcugauscsu | | GGACUUGAGU | |
| AD-1626636 | asusaac(Chd)gaAfUfGf | 878 | VPusdCsaudAadGuuucdA | 1237 | UUAUAACCGAAUG | 1596 |
| | aaacuuaugaL96 | | uUfcgguuausasa | | AAACUUAUGA | |
| AD-1626946 | csascac(Ahd)uuUfGfGf | 879 | VPusdCsagdAadAcaucdC | 1238 | GGCACACAUUUGG | 1597 |
| | auguuucugaL96 | | aAfaugugugscsc | | AUGUUUCUGA | |
| AD-1627077 | asusgcu(Uhd)ugGfCfAf | 880 | VPusdCscgdAadGuuuudG | 1239 | UGAUGCUUUGGCA | 1598 |
| | aaacuucggaL96 | | cCfaaagcauscsa | | AAACUUCGGA | |
| AD-1631070 | uscscag(Ahd)CfuGfCf | 881 | VPusGfsuucu(Agn)cauagc | 1240 | AUUCCAGACUGCU | 1599 |
| | UfauguagaacaL96 | | AfgUfcuggasasu | | AUGUAGAACU | |
| AD-1627308 | asasuca(Ghd)gaGfUfCf | 882 | VPusdAsugdAadGaaggdA | 1241 | UGAAUCAGGAGUC | 1600 |
| | cuucuucauaL96 | | cUfccugauuscsa | | CUUCUUCAUU | |
| AD-1631081 | gscscuu(Ahd)UfuUfUf | 883 | VPusAfsuccc(Agn)uuggaa | 1242 | AUGCCUUAUUUUC | 1601 |
| | CfcaaugggauaL96 | | AfaUfaaggcsasu | | CAAUGGGAUU | |
| AD-1627625 | gscscuu(Ahd)uuUfUfCf | 884 | VPusdAsucdCcdAuuggdA | 1243 | AUGCCUUAUUUUC | 1602 |
| | caaugggauaL96 | | aAfauaaggcsasu | | CAAUGGGAUU | |
| AD-1627820 | asasaau(Uhd)acAfGfUf | 885 | VPusdCsaadGadAggaadC | 1244 | UAAAAAUUACAGU | 1603 |
| | uccuucuugaL96 | | uGfuaauuuususa | | UCCUUCUUGU | |
| AD-1631098 | asasucu(Uhd)AfcUfUf | 886 | VPusUfscaag(Tgn)caucaa | 1245 | AAAAUCUUACUUG | 1604 |
| | GfaugacuugaaL96 | | GfuAfagauususu | | AUGACUUGAU | |
| AD-1631113 | gsusugg(Ahd)AfuUfUf | 887 | VPusGfsagcu(Tgn)guucaa | 1246 | GAGUUGGAAUUU | 1605 |
| | GfaacaagcucaL96 | | AfuUfccaacsusc | | GAACAAGCUCC | |
| AD-1631115 | asgscuc(Chd)AfgAfGf | 888 | VPusCfsuagg(Agn)gaaacu | 1247 | CAAGCUCCAGAGU | 1606 |
| | UfuucuccuagaL96 | | CfuGfgagcususg | | UUCUCCUAGG | |
| AD-1631118 | csasgag(Uhd)UfuCfUf | 889 | VPusAfsucac(C2p)uaggag | 1248 | UCCAGAGUUUCUC | 1607 |
| | CfcuaggugauaL96 | | AfaAfcucugsgsa | | CUAGGUGAUG | |
| AD-1631128 | gscscuc(Ahd)CfuAfGf | 890 | VPusCfsugua(G2p)gguucu | 1249 | CAGCCUCACUAGA | 1608 |
| | AfacccuacagaL96 | | AfgUfgaggcsusg | | ACCCUACAGC | |
| AD-1628318 | gscscuc(Ahd)cuAfGfAf | 891 | VPusdCsugdTadGgguudC | 1250 | CAGCCUCACUAGA | 1609 |
| | acccuacagaL96 | | uAfgugaggcsusg | | ACCCUACAGC | |
| AD-1631131 | ascsuca(Ghd)CfcAfUfG | 892 | VPusGfsuaua(Tgn)aaucau | 1251 | CCACUCAGCCAUG | 1610 |
| | fauuauauacaL96 | | GfgCfugagusgsg | | AUUAUAUACC | |
| AD-1628381 | ascsuca(Ghd)ccAfUfGf | 893 | VPusdGsuadTadTaaucdAu | 1252 | CCACUCAGCCAUG | 1611 |
| | auuauauacaL96 | | Gfgcugagusgsg | | AUUAUAUACC | |
| AD-1631132 | csuscag(Chd)CfaUfGfA | 894 | VPusGfsguau(Agn)uaauca | 1253 | CACUCAGCCAUGA | 1612 |
| | fuuauauaccaL96 | | UfgGfcugagsusg | | UUAUAUACCG | |
| AD-1628382 | csuscag(Chd)caUfGfAf | 895 | VPusdGsgudAudAuaaudC | 1254 | CACUCAGCCAUGA | 1613 |
| | uuauauaccaL96 | | aUfggcugagsusg | | UUAUAUACCG | |
| AD-1631161 | gscscuu(Ghd)GfuGfCf | 896 | VPusAfscagg(Agn)agaugc | 1255 | UAGCCUUGGUGCA | 1614 |
| | AfucuuccuguaL96 | | AfcCfaaggcsusa | | UCUUCCUGUU | |
| AD-1628963 | gscscuu(Ghd)guGfCfAf | 897 | VPusdAscadGgdAagaudG | 1256 | UAGCCUUGGUGCA | 1615 |
| | ucuuccuguaL96 | | cAfccaaggcsusa | | UCUUCCUGUU | |
| AD-1631162 | cscsuug(Ghd)UfgCfAf | 898 | VPusAfsacag(G2p)aagaug | 1257 | AGCCUUGGUGCAU | 1616 |
| | UfcuuccuguuaL96 | | CfaCfcaaggscsu | | CUUCCUGUUG | |
| AD-1631177 | asuscaa(Uhd)AfcCfGfA | 899 | VPusUfsuccc(Agn)ucuucg | 1258 | UCAUCAAUACCGA | 1617 |
| | fagaugggaaaL96 | | GfuAfuugausgsa | | AGAUGGGAAA | |
| AD-1631182 | csusugu(Uhd)UfgUfAf | 900 | VPusGfsgaau(Tgn)gcaaua | 1259 | CACUUGUUUGUAU | 1618 |
| | UfugcaauuccaL96 | | CfaAfacaagsusg | | UGCAAUUCCU | |
| AD-1629092 | csusugu(Uhd)ugUfAfU | 901 | VPusdGsgadAudTgcaadTa | 1260 | CACUUGUUUGUAU | 1619 |
| | fugcaauuccaL96 | | Cfaaacaagsusg | | UGCAAUUCCU | |
| AD-1629223 | ascsucc(Ahd)uuGfAfUf | 902 | VPusdCsucdAadAcacadTc | 1261 | GUACUCCAUUGAU | 1620 |
| | guguuugagaL96 | | Afauggagusasc | | GUGUUUGAGU | |
| AD-1631215 | gsasaag(Ahd)GfaUfAf | 903 | VPusAfsgcaa(G2p)auugua | 1262 | CAGAAAGAGAUAC | 1621 |
| | CfaaucuugcuaL96 | | UfcUfcuuucsusg | | AAUCUUGCUU | |
| AD-1629763 | gsasaag(Ahd)gaUfAfCf | 904 | VPusdAsgcdAadGauugdT | 1263 | CAGAAAGAGAUAC | 1622 |
| | aaucuugcuaL96 | | aUfcucuuucsusg | | AAUCUUGCUU | |
| AD-1631034 | csascua(Ghd)CfaAfGfA | 905 | VPusGfsauca(C2p)cauucu | 1264 | UACACUAGCAAGA | 1623 |
| | fauggugaucaL96 | | UfgCfuagugsusa | | AUGGUGAUCA | |
| AD-1631053 | uscsuuc(Chd)AfcAfCf | 906 | VPusAfsagac(C2p)gcaagu | 1265 | AAUCUUCCACACU | 1624 |
| | UfugcggucuuaL96 | | GfuGfgaagasusu | | UGCGGUCUUU | |
| AD-1626270 | uscsuuc(Chd)acAfCfUf | 907 | VPusdAsagdAcdCgcaadG | 1266 | AAUCUUCCACACU | 1625 |
| | ugcggucuuaL96 | | uGfuggaagasusu | | UGCGGUCUUU | |
| AD-1631054 | csusucc(Ahd)CfaCfUfU | 908 | VPusAfsaaga(C2p)cgcaag | 1267 | AUCUUCCACACUU | 1626 |
| | fgcggucuuuaL96 | | UfgUfggaagsasu | | GCGGUCUUUA | |
| AD-1626280 | ususgcg(Ghd)ucUfUfUf | 909 | VPusdCsucdAudAucuadA | 1268 | ACUUGCGGUCUUU | 1627 |
| | agauaugagaL96 | | aGfaccgcaasgsu | | AGAUAUGAGC | |
| AD-1631064 | usgsuac(Chd)UfuGfCf | 910 | VPusGfsucau(Agn)gacagc | 1269 | AUUGUACCUUGCU | 1628 |
| | UfgucuaugacaL96 | | AfaGfguacasasu | | GUCUAUGACC | |
| AD-1631072 | gscsuuc(Chd)UfcAfCf | 911 | VPusAfsguga(Agn)cugcgu | 1270 | GAGCUUCCUCACG | 1629 |
| | GfcaguucacuaL96 | | GfaGfgaagcsusc | | CAGUUCACUU | |
| AD-1631074 | csasgug(Ahd)AfaGfUf | 912 | VPusAfscaac(C2p)uuccac | 1271 | GACAGUGAAAGUG | 1630 |
| | GfgaagguuguaL96 | | UfuUfcacugsusc | | GAAGGUUGUC | |
| AD-1627410 | csasgug(Ahd)aaGfUfGf | 913 | VPusdAscadAcdCuuccdA | 1272 | GACAGUGAAAGUG | 1631 |
| | gaagguuguaL96 | | cUfuucacugsusc | | GAAGGUUGUC | |
| AD-1631122 | gsasugg(Chd)AfgUfUf | 914 | VPusAfscuga(Tgn)ccaaaa | 1273 | GUGAUGGCAGUUU | 1632 |
| | UfuggaucaguaL96 | | CfuGfccaucsasc | | UGGAUCAGUU | |
| AD-1631137 | ususcac(Ahd)CfuGfUf | 915 | VPusGfscauu(G2p)ggauac | 1274 | UUUUCACACUGUA | 1633 |
| | AfucccaaugcaL96 | | AfgUfgugaasasa | | UCCCAAUGCU | |
| AD-1628434 | csasuca(Uhd)ugCfAfAf | 916 | VPusdCsagdCadAucuudT | 1275 | GCCAUCAUUGCAA | 1634 |
| | agauugcugaL96 | | gCfaaugaugsgsc | | AGAUUGCUGA | |
| AD-1631146 | csuscag(Uhd)AfcUfGf | 917 | VPusCfsauuc(Tgn)acagca | 1276 | UGCUCAGUACUGC | 1635 |
| | CfuguagaaugaL96 | | GfuAfcugagscsa | | UGUAGAAUGG | |
| AD-1631154 | gsasauu(Ahd)GfuCfUf | 918 | VPusCfsucgu(C2p)agacag | 1277 | CUGAAUUAGUCUG | 1636 |
| | GfucugacgagaL96 | | AfcUfaauucsasg | | UCUGACGAGA | |
| AD-1628764 | gsasauu(Ahd)guCfUfGf | 919 | VPusdCsucdGudCagacdA | 1278 | CUGAAUUAGUCUG | 1637 |
| | ucugacgagaL96 | | gAfcuaauucsasg | | UCUGACGAGA | |
| AD-1631155 | usasgua(Ghd)AfaUfAf | 920 | VPusCfsuaag(C2p)acaaua | 1279 | GAUAGUAGAAUA | 1638 |
| | UfugugcuuagaL96 | | UfuCfuacuasusc | | UUGUGCUUAGC | |
| AD-1631164 | gsgsgac(Ahd)CfaGfUf | 921 | VPusAfsgagu(Agn)ccagac | 1280 | CUGGGACACAGUC | 1639 |
| | CfugguacucuaL96 | | UfgUfgucccsasg | | UGGUACUCUC | |
| AD-1631165 | csascag(Uhd)CfuGfGf | 922 | VPusCfsagga(G2p)aguacc | 1281 | GACACAGUCUGGU | 1640 |
| | UfacucuccugaL96 | | AfgAfcugugsusc | | ACUCUCCUGG | |
| AD-1629012 | csascag(Uhd)cuGfGfUf | 923 | VPusdCsagdGadGaguadC | 1282 | GACACAGUCUGGU | 1641 |
| | acucuccugaL96 | | cAfgacugugsusc | | ACUCUCCUGG | |
| AD-1631174 | gsuscau(Chd)AfaUfAf | 924 | VPusCfscauc(Tgn)ucggua | 1283 | UGGUCAUCAAUAC | 1642 |
| | CfcgaagauggaL96 | | UfuGfaugacscsa | | CGAAGAUGGG | |
| AD-1629032 | gsuscau(Chd)aaUfAfCf | 925 | VPusdCscadTcdTucggdTa | 1284 | UGGUCAUCAAUAC | 1643 |
| | cgaagauggaL96 | | Ufugaugacscsa | | CGAAGAUGGG | |
| AD-1631180 | gsgsgaa(Ahd)AfaGfAf | 926 | VPusAfsgggu(Agn)ugucuc | 1285 | AUGGGAAAAAGA | 1644 |
| | GfacauacccuaL96 | | UfuUfuucccsasu | | GACAUACCCUA | |
| AD-1631181 | asasaga(Ghd)AfcAfUf | 927 | VPusUfsuucu(Agn)ggguau | 1286 | AAAAAGAGACAUA | 1645 |
| | AfcccuagaaaaL96 | | GfuCfucuuususu | | CCCUAGAAAA | |
| AD-1631188 | usascua(Ahd)AfuAfUf | 928 | VPusGfsacau(Tgn)uccuau | 1287 | GAUACUAAAUAUA | 1646 |
| | AfggaaaugucaL96 | | AfuUfuaguasusc | | GGAAAUGUCA | |
| AD-1629200 | usascua(Ahd)auAfUfAf | 929 | VPusdGsacdAudTuccudA | 1288 | GAUACUAAAUAUA | 1647 |
| | ggaaaugucaL96 | | uAfuuuaguasusc | | GGAAAUGUCA | |
| AD-1631191 | gsasugu(Ghd)UfuUfGf | 930 | VPusUfsggau(Tgn)cacuca | 1289 | UUGAUGUGUUUG | 1648 |
| | AfgugaauccaaL96 | | AfaCfacaucsasa | | AGUGAAUCCAC | |
| AD-1629808 | ascsaug(Ahd)agUfGfCf | 931 | VPusdCsuadAadTuuugdC | 1290 | CCACAUGAAGUGC | 1649 |
| | aaaauuuagaL96 | | aCfuucaugusgsg | | AAAAUUUAGA | |
| AD-1629838 | asgsuga(Ghd)aaAfAfGf | 932 | VPusdCsagdCudAauucdT | 1291 | GAAGUGAGAAAA | 1650 |
| | aauuagcugaL96 | | uUfucucacususc | | GAAUUAGCUGA | |
| AD-1631049 | asasuuu(Uhd)CfuUfGf | 933 | VPusGfsgcau(Agn)gcagca | 1292 | UGAAUUUUCUUGC | 1651 |
| | CfugcuaugccaL96 | | AfgAfaaauuscsa | | UGCUAUGCCU | |
| AD-1631079 | gsasaua(Uhd)UfuGfCf | 934 | VPusCfsuugg(Agn)accagc | 1293 | AAGAAUAUUUGCU | 1652 |
| | UfgguuccaagaL96 | | AfaAfuauucsusu | | GGUUCCAAGC | |
| AD-1627631 | ususuuc(Chd)aaUfGfGf | 935 | VPusdAsccdAadAauccdC | 1294 | UAUUUUCCAAUGG | 1653 |
| | gauuuugguaL96 | | aUfuggaaaasusa | | GAUUUUGGUC | |
| AD-1631095 | gsgsuug(Chd)UfgGfAf | 936 | VPusAfsauau(C2p)aaucuc | 1295 | UGGGUUGCUGGAG | 1654 |
| | GfauugauauuaL96 | | CfaGfcaaccscsa | | AUUGAUAUUU | |
| AD-1631096 | usgsaag(Ghd)AfgAfAf | 937 | VPusUfscaac(Agn)gaguuu | 1296 | GGUGAAGGAGAA | 1655 |
| | AfcucuguugaaL96 | | CfuCfcuucascsc | | ACUCUGUUGAA | |
| AD-1631121 | usgsaug(Ghd)CfaGfUf | 938 | VPusCfsugau(C2p)caaaac | 1297 | GGUGAUGGCAGUU | 1656 |
| | UfuuggaucagaL96 | | UfgCfcaucascsc | | UUGGAUCAGU | |
| AD-1628133 | usgsaug(Ghd)caGfUfUf | 939 | VPusdCsugdAudCcaaadA | 1298 | GGUGAUGGCAGUU | 1657 |
| | uuggaucagaL96 | | cUfgccaucascsc | | UUGGAUCAGU | |
| AD-1631140 | gscsaaa(Ghd)AfuUfGf | 940 | VPusCfscgua(G2p)ucagca | 1299 | UUGCAAAGAUUGC | 1658 |
| | CfugacuacggaL96 | | AfuCfuuugcsasa | | UGACUACGGC | |
| AD-1628441 | gscsaaa(Ghd)auUfGfCf | 941 | VPusdCscgdTadGucagdCa | 1300 | UUGCAAAGAUUGC | 1659 |
| | ugacuacggaL96 | | Afucuuugcsasa | | UGACUACGGC | |
| AD-1631166 | csasguc(Uhd)GfgUfAf | 942 | VPusAfsccag(G2p)agagua | 1301 | CACAGUCUGGUAC | 1660 |
| | CfucuccugguaL96 | | CfcAfgacugsusg | | UCUCCUGGUC | |
| AD-1631169 | csusccu(Ghd)GfuCfAf | 943 | VPusUfscggu(Agn)uugaug | 1302 | CUCUCCUGGUCAU | 1661 |
| | UfcaauaccgaaL96 | | AfcCfaggagsasg | | CAAUACCGAA | |
| AD-1629026 | csusccu(Ghd)guCfAfUf | 944 | VPusdTscgdGudAuugadT | 1303 | CUCUCCUGGUCAU | 1662 |
| | caauaccgaaL96 | | gAfccaggagsasg | | CAAUACCGAA | |
| AD-1631171 | cscsugg(Uhd)CfaUfCf | 945 | VPusCfsuucg(G2p)uauuga | 1304 | CUCCUGGUCAUCA | 1663 |
| | AfauaccgaagaL96 | | UfgAfccaggsasg | | AUACCGAAGA | |
| AD-1629028 | cscsugg(Uhd)caUfCfAf | 946 | VPusdCsuudCgdGuauudG | 1305 | CUCCUGGUCAUCA | 1664 |
| | auaccgaagaL96 | | aUfgaccaggsasg | | AUACCGAAGA | |
| AD-1631172 | csusggu(Chd)AfuCfAf | 947 | VPusUfscuuc(G2p)guauug | 1306 | UCCUGGUCAUCAA | 1665 |
| | AfuaccgaagaaL96 | | AfuGfaccagsgsa | | UACCGAAGAU | |
| AD-1631178 | asusacc(Ghd)AfaGfAf | 948 | VPusCfsuuuu(Tgn)cccauc | 1307 | CAAUACCGAAGAU | 1666 |
| | UfgggaaaaagaL96 | | UfuCfgguaususg | | GGGAAAAAGA | |
| AD-1629039 | asusacc(Ghd)aaGfAfUf | 949 | VPusdCsuudTudTcccadTc | 1308 | CAAUACCGAAGAU | 1667 |
| | gggaaaaagaL96 | | Ufucgguaususg | | GGGAAAAAGA | |
| AD-1631209 | gscsucu(Uhd)UfgGfAf | 950 | VPusCfscagu(Tgn)ccuauc | 1309 | CUGCUCUUUGGAU | 1668 |
| | UfaggaacuggaL96 | | CfaAfagagcsasg | | AGGAACUGGA | |
| AD-1629581 | gscsucu(Uhd)ugGfAfUf | 951 | VPusdCscadGudTccuadTc | 1310 | CUGCUCUUUGGAU | 1669 |
| | JaggaacuggaL96 | | Cfaaagagcsasg | | AGGAACUGGA | |
| AD-1631221 | asasaau(Ahd)UfuAfAf | 952 | VPusGfsgaaa(C2p)ugucuu | 1311 | UGAAAAUAUUAA | 1670 |
| | GfacaguuuccaL96 | | AfaUfauuuuscsa | | GACAGUUUCCC | |
| AD-1630135 | asasaau(Ahd)uuAfAfGf | 953 | VPusdGsgadAadCugucdT | 1312 | UGAAAAUAUUAA | 1671 |
| | acaguuuccaL96 | | uAfauauuuuscsa | | GACAGUUUCCC | |
| AD-1625282 | gsasaug(Ghd)ugAfUfCf | 954 | VPusdCsugdAudAucugdA | 1313 | AAGAAUGGUGAUC | 1672 |
| | agauaucagaL96 | | uCfaccauucsusu | | AGAUAUCAGA | |
| AD-1631036 | asgsgag(Ahd)AfuUfUf | 955 | VPusCfsaucu(C2p)gguaaa | 1314 | GUAGGAGAAUUU | 1673 |
| | UfaccgagaugaL96 | | AfuUfcuccusasc | | UACCGAGAUGC | |
| AD-1631037 | ususuua(Chd)CfgAfGf | 956 | VPusAfsauac(G2p)gcaucu | 1315 | AAUUUUACCGAGA | 1674 |
| | AfugccguauuaL96 | | CfgGfuaaaasusu | | UGCCGUAUUA | |
| AD-1625499 | ususuua(Chd)cgAfGfAf | 957 | VPusdAsaudAcdGgcaudC | 1316 | AAUUUUACCGAGA | 1675 |
| | ugccguauuaL96 | | uCfgguaaaasusu | | UGCCGUAUUA | |
| AD-1631039 | csasgaa(Uhd)GfcAfCfU | 958 | VPusAfsagcu(C2p)gugagu | 1317 | ACCAGAAUGCACU | 1676 |
| | fcacgagcuuaL96 | | GfcAfuucugsgsu | | CACGAGCUUU | |
| AD-1631048 | gsasacu(Uhd)UfcUfUf | 959 | VPusGfsacaa(G2p)ccucaa | 1318 | GAGAACUUUCUUG | 1677 |
| | GfaggcuugucaL96 | | GfaAfaguucsusc | | AGGCUUGUCC | |
| AD-1631052 | asasucu(Uhd)CfcAfCfA | 960 | VPusGfsaccg(C2p)aagugu | 1319 | UAAAUCUUCCACA | 1678 |
| | fcuugcggucaL96 | | GfgAfagauususa | | CUUGCGGUCU | |
| AD-1626268 | asasucu(Uhd)ccAfCfAf | 961 | VPusdGsacdCgdCaagudG | 1320 | UAAAUCUUCCACA | 1679 |
| | cuugcggucaL96 | | uGfgaagauususa | | CUUGCGGUCU | |
| AD-1626927 | asasagg(Chd)ucGfCfGf | 962 | VPusdAsagdAadGaagcdG | 1321 | AUAAAGGCUCGCG | 1680 |
| | cuucuucuuaL96 | | cGfagccuuusasu | | CUUCUUCUUC | |
| AD-1626936 | ususcuc(Ghd)uuGfGfCf | 963 | VPusdCsaadAudGugugdC | 1322 | GAUUCUCGUUGGC | 1681 |
| | acacauuugaL96 | | cAfacgagaasusc | | ACACAUUUGG | |
| AD-1627601 | asasuua(Uhd)caUfCfCf | 964 | VPusdCsaudAudAgucgdG | 1323 | GAAAUUAUCAUCC | 1682 |
| | gacuauaugaL96 | | aUfgauaauususc | | GACUAUAUGA | |
| AD-1631084 | ususacu(Uhd)AfaAfUf | 965 | VPusCfsagga(G2p)accaau | 1324 | AUUUACUUAAAUU | 1683 |
| | UfggucuccugaL96 | | UfuAfaguaasasu | | GGUCUCCUGA | |
| AD-1631090 | ususauu(Ghd)UfcUfGf | 966 | VPusCfsagau(C2p)cuacca | 1325 | GCUUAUUGUCUGG | 1684 |
| | GfuaggaucugaL96 | | GfaCfaauaasgsc | | UAGGAUCUGA | |
| AD-1627772 | ususauu(Ghd)ucUfGfGf | 967 | VPusdCsagdAudCcuacdC | 1326 | GCUUAUUGUCUGG | 1685 |
| | uaggaucugaL96 | | aGfacaauaasgsc | | UAGGAUCUGA | |
| AD-1627838 | usgsuag(Ahd)aaAfGfGf | 968 | VPusdAsgadAudAcagcdC | 1327 | CUUGUAGAAAAGG | 1686 |
| | cuguauucuaL96 | | uUfuucuacasasg | | CUGUAUUCUU | |
| AD-1631092 | usgsugg(Ahd)CfcAfCf | 969 | VPusGfsagaa(Tgn)caaugu | 1328 | GUUGUGGACCACA | 1687 |
| | AfuugauucucaL96 | | GfgUfccacasasc | | UUGAUUCUCU | |
| AD-1627870 | usgsugg(Ahd)ccAfCfAf | 970 | VPusdGsagdAadTcaaudG | 1329 | GUUGUGGACCACA | 1688 |
| | uugauucucaL96 | | uGfguccacasasc | | UUGAUUCUCU | |
| AD-1631094 | gsgsguu(Ghd)CfuGfGf | 971 | VPusAfsuauc(Agn)aucucc | 1330 | CUGGGUUGCUGGA | 1689 |
| | AfgauugauauaL96 | | AfgCfaacccsasg | | GAUUGAUAUU | |
| AD-1631112 | usgsacc(Uhd)GfcCfUf | 972 | VPusUfsaaua(Tgn)uucuag | 1331 | GCUGACCUGCCUA | 1690 |
| | AfgaaauauuaaL96 | | GfcAfggucasgsc | | GAAAUAUUAU | |
| AD-1631138 | ascsacu(Ghd)UfaUfCfC | 973 | VPusGfscagc(Agn)uuggga | 1332 | UCACACUGUAUCC | 1691 |
| | fcaaugcugcaL96 | | UfaCfagugusgsa | | CAAUGCUGCC | |
| AD-1631142 | asasgau(Uhd)GfcUfGf | 974 | VPusAfsugcc(G2p)uaguca | 1333 | CAAAGAUUGCUGA | 1692 |
| | AfcuacggcauaL96 | | GfcAfaucuususg | | CUACGGCAUU | |
| AD-1628444 | asasgau(Uhd)gcUfGfAf | 975 | VPusdAsugdCcdGuagudC | 1334 | CAAAGAUUGCUGA | 1693 |
| | cuacggcauaL96 | | aGfcaaucuususg | | CUACGGCAUU | |
| AD-1628590 | asascug(Ghd)agGfUfAf | 976 | VPusdCsuadCudAuucudA | 1335 | ACAACUGGAGGUA | 1694 |
| | gaauaguagaL96 | | cCfuccaguusgsu | | GAAUAGUAGA | |
| AD-1631149 | gsusaga(Ghd)GfgUfUf | 977 | VPusGfsgaaa(C2p)uucaaa | 1336 | UAGUAGAGGGUU | 1695 |
| | UfgaaguuuccaL96 | | CfcCfucuacsusa | | UGAAGUUUCCA | |
| AD-1631156 | asgsuag(Ahd)AfuAfUf | 978 | VPusGfscuaa(G2p)cacaau | 1337 | AUAGUAGAAUAU | 1696 |
| | UfgugcuuagcaL96 | | AfuUfcuacusasu | | UGUGCUUAGCC | |
| AD-1631163 | usgsgga(Chd)AfcAfGf | 979 | VPusGfsagua(C2p)cagacu | 1338 | UCUGGGACACAGU | 1697 |
| | UfcugguacucaL96 | | GfuGfucccasgsa | | CUGGUACUCU | |
| AD-1629007 | usgsgga(Chd)acAfGfUf | 980 | VPusdGsagdTadCcagadCu | 1339 | UCUGGGACACAGU | 1698 |
| | cugguacucaL96 | | Gfugucccasgsa | | CUGGUACUCU | |
| AD-1629025 | uscsucc(Uhd)ggUfCfAf | 981 | VPusdCsggdTadTugaudG | 1340 | ACUCUCCUGGUCA | 1699 |
| | ucaauaccgaL96 | | aCfcaggagasgsu | | UCAAUACCGA | |
| AD-1631206 | csasaaa(Uhd)GfuCfUfU | 982 | VPusUfsccca(G2p)aauaag | 1341 | CACAAAAUGUCUU | 1700 |
| | fauucugggaaL96 | | AfcAfuuuugsusg | | AUUCUGGGAG | |
| AD-1631040 | usgscac(Uhd)CfaCfGfA | 983 | VPusGfsugga(Agn)agcucg | 1342 | AAUGCACUCACGA | 1701 |
| | fgcuuuccacaL96 | | UfgAfgugcasusu | | GCUUUCCACA | |
| AD-1625786 | usgscac(Uhd)caCfGfAf | 984 | VPusdGsugdGadAagcudC | 1343 | AAUGCACUCACGA | 1702 |
| | gcuuuccacaL96 | | gUfgagugcasusu | | GCUUUCCACA | |
| AD-1631055 | asusaug(Ahd)GfcAfGf | 985 | VPusAfsauau(C2p)auugcu | 1344 | AGAUAUGAGCAGC | 1703 |
| | CfaaugauauuaL96 | | GfcUfcauauscsu | | AAUGAUAUUC | |
| AD-1627110 | ascsgag(Ahd)gcCfUfUf | 986 | VPusdCsuudGadAauuadA | 1345 | AAACGAGAGCCUU | 1704 |
| | aauuucaagaL96 | | gGfcucucgususu | | AAUUUCAAGA | |
| AD-1631071 | asasuga(Ghd)CfuUfCfC | 987 | VPusAfscugc(G2p)ugagga | 1346 | AAAAUGAGCUUCC | 1705 |
| | fucacgcaguaL96 | | AfgCfucauususu | | UCACGCAGUU | |
| AD-1631075 | asgsuga(Ahd)AfgUfGf | 988 | VPusGfsacaa(C2p)cuucca | 1347 | ACAGUGAAAGUGG | 1706 |
| | GfaagguugucaL96 | | CfuUfucacusgsu | | AAGGUUGUCC | |
| AD-1627411 | asgsuga(Ahd)agUfGfGf | 989 | VPusdGsacdAadCcuucdC | 1348 | ACAGUGAAAGUGG | 1707 |
| | aagguugucaL96 | | aCfuuucacusgsu | | AAGGUUGUCC | |
| AD-1627717 | gscscca(Ahd)acAfGfAf | 990 | VPusdCscadAudAcauudC | 1349 | UCGCCCAAACAGA | 1708 |
| | auguauuggaL96 | | uGfuuugggcsgsa | | AUGUAUUGGC | |
| AD-1631086 | cscsuga(Ahd)GfcUfUf | 991 | VPusAfsccag(Agn)caauaa | 1350 | CUCCUGAAGCUUA | 1709 |
| | AfuugucugguaL96 | | GfcUfucaggsasg | | UUGUCUGGUA | |
| AD-1631088 | gsasagc(Uhd)UfaUfUf | 992 | VPusCfscuac(C2p)agacaa | 1351 | CUGAAGCUUAUUG | 1710 |
| | GfucugguaggaL96 | | UfaAfgcuucsasg | | UCUGGUAGGA | |
| AD-1627767 | gsasagc(Uhd)uaUfUfGf | 993 | VPusdCscudAcdCagacdA | 1352 | CUGAAGCUUAUUG | 1711 |
| | ucugguaggaL96 | | aUfaagcuucsasg | | UCUGGUAGGA | |
| AD-1628070 | gsasccu(Ghd)ccUfAfGf | 994 | VPusdAsuadAudAuuucdT | 1353 | CUGACCUGCCUAG | 1712 |
| | aaauauuauaL96 | | aGfgcaggucsasg | | AAAUAUUAUG | |
| AD-1631127 | cscsucc(Ahd)AfgGfGf | 995 | VPusAfsucca(Agn)ggaacc | 1354 | AGCCUCCAAGGGU | 1713 |
| | UfuccuuggauaL96 | | CfuUfggaggscsu | | UCCUUGGAUC | |
| AD-1628273 | cscsucc(Ahd)agGfGfUf | 996 | VPusdAsucdCadAggaadC | 1355 | AGCCUCCAAGGGU | 1714 |
| | uccuuggauaL96 | | cCfuuggaggscsu | | UCCUUGGAUC | |
| AD-1628396 | csascaa(Uhd)guGfCfUf | 997 | VPusdGsugdAadAagcadG | 1356 | CCCACAAUGUGCU | 1715 |
| | gcuuuucacaL96 | | cAfcauugugsgsg | | GCUUUUCACA | |
| AD-1631148 | gsasggu(Ahd)GfaAfUf | 998 | VPusAfscccu(C2p)uacuau | 1357 | UGGAGGUAGAAU | 1716 |
| | AfguagaggguaL96 | | UfcUfaccucscsa | | AGUAGAGGGUU | |
| AD-1628668 | cscsagu(Uhd)aaAfGfAf | 999 | VPusdCsaadCcdAuauudC | 1358 | AUCCAGUUAAAGA | 1717 |
| | auaugguugaL96 | | uUfuaacuggsasu | | AUAUGGUUGU | |
| AD-1631160 | usasgcc(Uhd)UfgGfUf | 1000 | VPusAfsggaa(G2p)augcac | 1359 | CUUAGCCUUGGUG | 1718 |
| | GfcaucuuccuaL96 | | CfaAfggcuasasg | | CAUCUUCCUG | |
| AD-1628961 | usasgcc(Uhd)ugGfUfGf | 1001 | VPusdAsggdAadGaugcdA | 1360 | CUUAGCCUUGGUG | 1719 |
| | caucuuccuaL96 | | cCfaaggcuasasg | | CAUCUUCCUG | |
| AD-1631167 | asgsucu(Ghd)GfuAfCf | 1002 | VPusGfsacca(G2p)gagagu | 1361 | ACAGUCUGGUACU | 1720 |
| | UfcuccuggucaL96 | | AfcCfagacusgsu | | CUCCUGGUCA | |
| AD-1631176 | csasuca(Ahd)UfaCfCfG | 1003 | VPusUfsccca(Tgn)cuucgg | 1362 | GUCAUCAAUACCG | 1721 |
| | faagaugggaaL96 | | UfaUfugaugsasc | | AAGAUGGGAA | |
| AD-1631185 | ususcuu(Uhd)UfgGfUf | 1004 | VPusAfsgcgg(Tgn)uccaac | 1363 | UUUUCUUUUGGUU | 1722 |
| | Ufggaaccgcual96 | | CfaAfaagaasasa | | GGAACCGCUG | |
| AD-1631203 | csusguu(Ghd)UfgGfAf | 1005 | VPusAfsuccc(Agn)cacuuc | 1364 | CCCUGUUGUGGAA | 1723 |
| | AfgugugggauaL96 | | CfaCfaacagsgsg | | GUGUGGGAUA | |
| AD-1631208 | usgscuc(Uhd)UfuGfGf | 1006 | VPusCfsaguu(C2p)cuaucc | 1365 | ACUGCUCUUUGGA | 1724 |
| | AfuaggaacugaL96 | | AfaAfgagcasgsu | | UAGGAACUGG | |
| AD-1629580 | usgscuc(Uhd)uuGfGfAf | 1007 | VPusdCsagdTudCcuaudCc | 1366 | ACUGCUCUUUGGA | 1725 |
| | uaggaacugaL96 | | Afaagagcasgsu | | UAGGAACUGG | |
| AD-1631211 | asusucg(Ghd)UfcAfGf | 1008 | VPusCfsauca(Tgn)gacucu | 1367 | UAAUUCGGUCAGA | 1726 |
| | AfgucaugaugaL96 | | GfaCfcgaaususa | | GUCAUGAUGA | |
| AD-1629665 | asusucg(Ghd)ucAfGfAf | 1009 | VPusdCsaudCadTgacudCu | 1368 | UAAUUCGGUCAGA | 1727 |
| | gucaugaugaL96 | | Gfaccgaaususa | | GUCAUGAUGA | |
| AD-1631219 | usascua(Ahd)AfaUfUf | 1010 | VPusCfsggcc(Tgn)uauaaa | 1369 | CAUACUAAAAUUU | 1728 |
| | UfauaaggccgaL96 | | UfuUfuaguasusg | | AUAAGGCCGA | |
| AD-1631220 | csusaaa(Ahd)UfuUfAf | 1011 | VPusAfsucgg(C2p)cuuaua | 1370 | UACUAAAAUUUAU | 1729 |
| | UfaaggccgauaL96 | | AfaUfuuuagsusa | | AAGGCCGAUA | |
| AD-1631031 | gsgscca(Ahd)CfaAfUf | 1012 | VPusGfsgcaa(Agn)ugcuau | 1371 | GUGGCCAACAAUA | 1730 |
| | AfgcauuugccaL96 | | UfgUfuggccsasc | | GCAUUUGCCU | |
| AD-1625155 | gsgscca(Ahd)caAfUfAf | 1013 | VPusdGsgcdAadAugcudA | 1372 | GUGGCCAACAAUA | 1731 |
| | gcauuugccaL96 | | uUfguuggccsasc | | GCAUUUGCCU | |
| AD-1631068 | ascsucc(Uhd)GfaAfUf | 1014 | VPusAfscccu(C2p)gcuuau | 1373 | GAACUCCUGAAUA | 1732 |
| | AfagcgaggguaL96 | | UfcAfggagususc | | AGCGAGGGUU | |
| AD-1631085 | csusuaa(Ahd)UfuGfGf | 1015 | VPusCfsuuca(G2p)gagacc | 1374 | UACUUAAAUUGGU | 1733 |
| | UfcuccugaagaL96 | | AfaUfuuaagsusa | | CUCCUGAAGC | |
| AD-1631089 | asgscuu(Ahd)UfuGfUf | 1016 | VPusAfsuccu(Agn)ccagac | 1375 | GAAGCUUAUUGUC | 1734 |
| | CfugguaggauaL96 | | AfaUfaagcususc | | UGGUAGGAUC | |
| AD-1627769 | asgscuu(Ahd)uuGfUfCf | 1017 | VPusdAsucdCudAccagdA | 1376 | GAAGCUUAUUGUC | 1735 |
| | ugguaggauaL96 | | cAfauaagcususc | | UGGUAGGAUC | |
| AD-1631097 | ususgaa(Ghd)AfaAfUf | 1018 | VPusUfsauaa(Tgn)gcccau | 1377 | UGUUGAAGAAAU | 1736 |
| | GfggcauuauaaL96 | | UfuCfuucaascsa | | GGGCAUUAUAU | |
| AD-1627952 | ususgaa(Ghd)aaAfUfGf | 1019 | VPusdTsaudAadTgcccdAu | 1378 | UGUUGAAGAAAU | 1737 |
| | ggcauuauaaL96 | | Ufucuucaascsa | | GGGCAUUAUAU | |
| AD-1631099 | gscsaga(Ghd)GfaAfGf | 1020 | VPusAfsagag(Agn)ucuccu | 1379 | AAGCAGAGGAAGG | 1738 |
| | GfagaucucuuaL96 | | UfcCfucugcsusu | | AGAUCUCUUA | |
| AD-1631105 | asasucc(Ahd)GfaUfCfA | 1021 | VPusAfsgccu(Tgn)gguuga | 1380 | UAAAUCCAGAUCA | 1739 |
| | faccaaggcuaL96 | | UfcUfggauususa | | ACCAAGGCUC | |
| AD-1628027 | asasucc(Ahd)gaUfCfAf | 1022 | VPusdAsgcdCudTgguudG | 1381 | UAAAUCCAGAUCA | 1740 |
| | accaaggcuaL96 | | aUfcuggauususa | | ACCAAGGCUC | |
| AD-1631106 | asuscca(Ghd)AfuCfAf | 1023 | VPusGfsagcc(Tgn)ugguug | 1382 | AAAUCCAGAUCAA | 1741 |
| | AfccaaggcucaL96 | | AfuCfuggaususu | | CCAAGGCUCA | |
| AD-1631119 | asgsagu(Uhd)UfcUfCf | 1024 | VPusCfsauca(C2p)cuagga | 1383 | CCAGAGUUUCUCC | 1742 |
| | CfuaggugaugaL96 | | GfaAfacucusgsg | | UAGGUGAUGG | |
| AD-1628118 | asgsagu(Uhd)ucUfCfCf | 1025 | VPusdCsaudCadCcuagdG | 1384 | CCAGAGUUUCUCC | 1743 |
| | uaggugaugaL96 | | aGfaaacucusgsg | | UAGGUGAUGG | |
| AD-1631157 | asasuau(Uhd)GfuGfCf | 1026 | VPusCfscaag(G2p)cuaagc | 1385 | AGAAUAUUGUGCU | 1744 |
| | UfuagccuuggaL96 | | AfcAfauauuscsu | | UAGCCUUGGU | |
| AD-1631158 | asusauu(Ghd)UfgCfUf | 1027 | VPusAfsccaa(G2p)gcuaag | 1386 | GAAUAUUGUGCUU | 1745 |
| | UfagccuugguaL96 | | CfaCfaauaususc | | AGCCUUGGUG | |
| AD-1628951 | asusauu(Ghd)ugCfUfUf | 1028 | VPusdAsccdAadGgcuadA | 1387 | GAAUAUUGUGCUU | 1746 |
| | agccuugguaL96 | | gCfacaauaususc | | AGCCUUGGUG | |
| AD-1631183 | ususuuc(Uhd)UfuUfGf | 1029 | VPusCfsgguu(C2p)caacca | 1388 | AAUUUUCUUUUGG | 1747 |
| | GfuuggaaccgaL96 | | AfaAfgaaaasusu | | UUGGAACCGC | |
| AD-1631186 | csusuuu(Ghd)GfuUfGf | 1030 | VPusUfscagc(G2p)guucca | 1389 | UUCUUUUGGUUGG | 1748 |
| | GfaaccgcugaaL96 | | AfcCfaaaagsasa | | AACCGCUGAU | |
| AD-1631202 | usasgcc(Chd)UfgUfUf | 1031 | VPusAfscacu(Tgn)ccacaa | 1390 | AAUAGCCCUGUUG | 1749 |
| | GfuggaaguguaL96 | | CfaGfggcuasusu | | UGGAAGUGUG | |
| AD-1629419 | usasgcc(Chd)ugUfUfGf | 1032 | VPusdAscadCudTccacdAa | 1391 | AAUAGCCCUGUUG | 1750 |
| | uggaaguguaL96 | | Cfagggcuasusu | | UGGAAGUGUG | |
| AD-1629878 | asgsgaa(Uhd)ugUfCfUf | 1033 | VPusdCscudAudCcaaadG | 1392 | AUAGGAAUUGUCU | 1751 |
| | uuggauaggaL96 | | aCfaauuccusasu | | UUGGAUAGGA | |
| AD-1627852 | usasuuc(Uhd)uuUfGfGf | 1034 | VPusdCsaadCudTggccdCa | 1393 | UGUAUUCUUUUGG | 1752 |
| | gccaaguugaL96 | | Afaagaauascsa | | GCCAAGUUGU | |
| AD-1631124 | asusguu(Ghd)GfuGfAf | 1035 | VPusGfscuaa(C2p)uccauc | 1394 | GGAUGUUGGUGA | 1753 |
| | UfggaguuagcaL96 | | AfcCfaacauscsc | | UGGAGUUAGCC | |
| AD-1628254 | asusguu(Ghd)guGfAfU | 1036 | VPusdGscudAadCuccadTc | 1395 | GGAUGUUGGUGA | 1754 |
| | fggaguuagcaL96 | | Afccaacauscsc | | UGGAGUUAGCC | |
| AD-1631143 | asusugc(Uhd)GfaCfUf | 1037 | VPusGfscaau(G2p)ccguag | 1396 | AGAUUGCUGACUA | 1755 |
| | AfcggcauugcaL96 | | UfcAfgcaauscsu | | CGGCAUUGCU | |
| AD-1631021 | usgsaua(Uhd)UfcAfCf | 1038 | VPusGfsgacc(Agn)guuugu | 1397 | AAUGAUAUUCACA | 1756 |
| | AfaacugguccaL96 | | GfaAfuaucasusu | | AACUGGUCCU | |
| AD-1631184 | ususucu(Uhd)UfuGfGf | 1039 | VPusGfscggu(Tgn)ccaacc | 1398 | AUUUUCUUUUGGU | 1757 |
| | UfuggaaccgcaL96 | | AfaAfagaaasasu | | UGGAACCGCU | |
| AD-1631212 | usasaaa(Ahd)UfgUfCf | 1040 | VPusAfsuacc(Agn)gcauga | 1399 | CUUAAAAAUGUCA | 1758 |
| | AfugcugguauaL96 | | CfaUfuuuuasasg | | UGCUGGUAUU | |
| AD-1629707 | asasaau(Ghd)ucAfUfGf | 1041 | VPusdCsaadTadCcagcdAu | 1400 | UAAAAAUGUCAUG | 1759 |
| | cugguauugaL96 | | Gfacauuuususa | | CUGGUAUUGG | |
| AD-1630136 | asasaua(Uhd)uaAfGfAf | 1042 | VPusdGsggdAadAcugudC | 1401 | GAAAAUAUUAAG | 1760 |
| | caguuucccaL96 | | uUfaauauuususc | | ACAGUUUCCCA | |
| AD-1624894 | gsasugc(Uhd)agAfGfAf | 1043 | VPusdCsacdAcdGcucudC | 1402 | GUGAUGCUAGAGA | 1761 |
| | gagcgugugaL96 | | uCfuagcaucsasc | | GAGCGUGUGA | |
| AD-1626921 | csasaua(Uhd)aaAfGfGf | 1044 | VPusdAsagdCgdCgagcdC | 1403 | UUCAAUAUAAAGG | 1762 |
| | cucgcgcuuaL96 | | uUfuauauugsasa | | CUCGCGCUUC | |
| AD-1631067 | asusaaa(Ghd)GfcUfCfG | 1045 | VPusGfsaaga(Agn)gcgcga | 1404 | AUAUAAAGGCUCG | 1763 |
| | fcgcuucuucaL96 | | GfcCfuuuausasu | | CGCUUCUUCU | |
| AD-1626925 | asusaaa(Ghd)gcUfCfGf | 1046 | VPusdGsaadGadAgcgcdG | 1405 | AUAUAAAGGCUCG | 1764 |
| | cgcuucuucaL96 | | aGfccuuuausasu | | CGCUUCUUCU | |
| AD-1631076 | gsusgaa(Ahd)GfuGfGf | 1047 | VPusGfsgaca(Agn)ccuucc | 1406 | CAGUGAAAGUGGA | 1765 |
| | AfagguuguccaL96 | | AfcUfuucacsusg | | AGGUUGUCCA | |
| AD-1627412 | gsusgaa(Ahd)guGfGfAf | 1048 | VPusdGsgadCadAccuudC | 1407 | CAGUGAAAGUGGA | 1766 |
| | agguuguccaL96 | | cAfcuuucacsusg | | AGGUUGUCCA | |
| AD-1631083 | asasaca(Ghd)AfaUfGfU | 1049 | VPusGfsucgc(C2p)aauaca | 1408 | CCAAACAGAAUGU | 1767 |
| | fauuggcgacaL96 | | UfuCfuguuusgsg | | AUUGGCGACA | |
| AD-1631120 | gsasguu(Uhd)CfuCfCf | 1050 | VPusCfscauc(Agn)ccuagg | 1409 | CAGAGUUUCUCCU | 1768 |
| | UfaggugauggaL96 | | AfgAfaacucsusg | | AGGUGAUGGC | |
| AD-1628119 | gsasguu(Uhd)cuCfCfUf | 1051 | VPusdCscadTcdAccuadGg | 1410 | CAGAGUUUCUCCU | 1769 |
| | aggugauggaL96 | | Afgaaacucsusg | | AGGUGAUGGC | |
| AD-1631123 | gsasugu(Uhd)GfgUfGf | 1052 | VPusCfsuaac(Tgn)ccauca | 1411 | CGGAUGUUGGUGA | 1770 |
| | AfuggaguuagaL96 | | CfcAfacaucscsg | | UGGAGUUAGC | |
| AD-1628253 | gsasugu(Uhd)ggUfGfA | 1053 | VPusdCsuadAcdTccaudCa | 1412 | CGGAUGUUGGUGA | 1771 |
| | fuggaguuagaL96 | | Cfcaacaucscsg | | UGGAGUUAGC | |
| AD-1631144 | usgscug(Ahd)CfuAfCf | 1054 | VPusGfsagca(Agn)ugccgu | 1413 | AUUGCUGACUACG | 1772 |
| | GfgcauugcucaL96 | | AfgUfcagcasasu | | GCAUUGCUCA | |
| AD-1631022 | uscsaca(Ahd)AfcUfGf | 1055 | VPusCfsugcu(Agn)ggacca | 1414 | AUUCACAAACUGG | 1773 |
| | GfuccuagcagaL96 | | GfuUfugugasasu | | UCCUAGCAGC | |
| AD-1624412 | uscsaca(Ahd)acUfGfGf | 1056 | VPusdCsugdCudAggacdC | 1415 | AUUCACAAACUGG | 1774 |
| | uccuagcagaL96 | | aGfuuugugasasu | | UCCUAGCAGC | |
| AD-1631159 | gscsuua(Ghd)CfcUfUf | 1057 | VPusAfsagau(G2p)caccaa | 1416 | GUGCUUAGCCUUG | 1775 |
| | GfgugcaucuuaL96 | | GfgCfuaagcsasc | | GUGCAUCUUC | |
| AD-1631168 | csuscuc(Chd)UfgGfUf | 1058 | VPusGfsguau(Tgn)gaugac | 1417 | UACUCUCCUGGUC | 1776 |
| | CfaucaauaccaL96 | | CfaGfgagagsusa | | AUCAAUACCG | |
| AD-1629024 | csuscuc(Chd)ugGfUfCf | 1059 | VPusdGsgudAudTgaugdA | 1418 | UACUCUCCUGGUC | 1777 |
| | aucaauaccaL96 | | cCfaggagagsusa | | AUCAAUACCG | |
| AD-1631179 | usgsgga(Ahd)AfaAfGf | 1060 | VPusGfsggua(Tgn)gucucu | 1419 | GAUGGGAAAAAG | 1778 |
| | AfgacauacccaL96 | | UfuUfucccasusc | | AGACAUACCCU | |
| AD-1631204 | gsusgca(Chd)UfuUfUf | 1061 | VPusAfsccuc(C2p)cuuaaa | 1420 | GCGUGCACUUUUU | 1779 |
| | UfaagggagguaL96 | | AfaGfugcacsgsc | | AAGGGAGGUA | |
| AD-1631213 | asusguc(Ahd)UfgCfUf | 1062 | VPusGfsccca(Agn)uaccag | 1421 | AAAUGUCAUGCUG | 1780 |
| | GfguauugggcaL96 | | CfaUfgacaususu | | GUAUUGGGCU | |
| AD-1629710 | asusguc(Ahd)ugCfUfGf | 1063 | VPusdGsccdCadAuaccdA | 1422 | AAAUGUCAUGCUG | 1781 |
| | guauugggcaL96 | | gCfaugacaususu | | GUAUUGGGCU | |
| AD-1631066 | usasuaa(Ahd)GfgCfUf | 1064 | VPusAfsagaa(G2p)cgcgag | 1423 | AAUAUAAAGGCUC | 1782 |
| | CfgcgcuucuuaL96 | | CfcUfuuauasusu | | GCGCUUCUUC | |
| AD-1631073 | ususgug(Ghd)AfaCfCf | 1065 | VPusAfsagcc(Agn)cuuggg | 1424 | CUUUGUGGAACCC | 1783 |
| | CfaaguggcuuaL96 | | UfuCfcacaasasg | | AAGUGGCUUU | |
| AD-1627866 | asasguu(Ghd)ugGfAfCf | 1066 | VPusdAsucdAadTguggdT | 1425 | CCAAGUUGUGGAC | 1784 |
| | cacauugauaL96 | | cCfacaacuusgsg | | CACAUUGAUU | |
| AD-1631107 | cscsaag(Ghd)CfuCfAfC | 1067 | VPusAfsuugg(Agn)auggug | 1426 | AACCAAGGCUCAC | 1785 |
| | fcauuccaauaL96 | | AfgCfcuuggsusu | | CAUUCCAAUA | |
| AD-1631126 | ususagc(Chd)UfcCfAf | 1068 | VPusAfsagga(Agn)cccuug | 1427 | AGUUAGCCUCCAA | 1786 |
| | AfggguuccuuaL96 | | GfaGfgcuaascsu | | GGGUUCCUUG | |
| AD-1631141 | asasaga(Uhd)UfgCfUf | 1069 | VPusUfsgccg(Tgn)agucag | 1428 | GCAAAGAUUGCUG | 1787 |
| | GfacuacggcaaL96 | | CfaAfucuuusgsc | | ACUACGGCAU | |
| AD-1628443 | asasaga(Uhd)ugCfUfGf | 1070 | VPusdTsgcdCgdTagucdA | 1429 | GCAAAGAUUGCUG | 1788 |
| | acuacggcaaL96 | | gCfaaucuuusgsc | | ACUACGGCAU | |
| AD-1631175 | uscsauc(Ahd)AfuAfCf | 1071 | VPusCfsccau(C2p)uucggu | 1430 | GGUCAUCAAUACC | 1789 |
| | CfgaagaugggaL96 | | AfuUfgaugascsc | | GAAGAUGGGA | |
| AD-1629033 | uscsauc(Ahd)auAfCfCf | 1072 | VPusdCsccdAudCuucgdG | 1431 | GGUCAUCAAUACC | 1790 |
| | gaagaugggaL96 | | uAfuugaugascsc | | GAAGAUGGGA | |
| AD-1629597 | csusgga(Ghd)gaGfGfCf | 1073 | VPusdTsaadAadTauggdCc | 1432 | AACUGGAGGAGGC | 1791 |
| | cauauuuuaaL96 | | Ufccuccagsusu | | CAUAUUUUAC | |
| AD-1631214 | usgsuca(Uhd)GfcUfGf | 1074 | VPusAfsgccc(Agn)auacca | 1433 | AAUGUCAUGCUGG | 1792 |
| | GfuauugggcuaL96 | | GfcAfugacasusu | | UAUUGGGCUA | |
| AD-1629711 | usgsuca(Uhd)gcUfGfGf | 1075 | VPusdAsgcdCcdAauacdC | 1434 | AAUGUCAUGCUGG | 1793 |
| | uauugggcuaL96 | | aGfcaugacasusu | | UAUUGGGCUA | |
| AD-1631065 | asasuau(Ahd)AfaGfGf | 1076 | VPusGfsaagc(G2p)cgagcc | 1435 | UCAAUAUAAAGGC | 1794 |
| | CfucgcgcuucaL96 | | UfuUfauauusgsa | | UCGCGCUUCU | |
| AD-1631069 | cscsuga(Ahd)UfaAfGf | 1077 | VPusGfsgaac(C2p)cucgcu | 1436 | CUCCUGAAUAAGC | 1795 |
| | CfgaggguuccaL96 | | UfaUfucaggsasg | | GAGGGUUCCC | |
| AD-1627390 | asasuca(Uhd)ggCfAfCf | 1078 | VPusdTscadAadAucugdT | 1437 | AAAAUCAUGGCAC | 1796 |
| | agauuuugaaL96 | | gCfcaugauususu | | AGAUUUUGAC | |
| AD-1631091 | csusuuu(Ghd)GfgCfCf | 1079 | VPusUfsccac(Agn)acuugg | 1438 | UUCUUUUGGGCCA | 1797 |
| | AfaguuguggaaL96 | | CfcCfaaaagsasa | | AGUUGUGGAC | |
| AD-1627856 | csusuuu(Ghd)ggCfCfAf | 1080 | VPusdTsccdAcdAacuudG | 1439 | UUCUUUUGGGCCA | 1798 |
| | aguuguggaaL96 | | gCfccaaaagsasa | | AGUUGUGGAC | |
| AD-1627896 | asasgaa(Uhd)ggUfUfUf | 1081 | VPusdCsaadCcdCaggadAa | 1440 | GGAAGAAUGGUU | 1799 |
| | ccuggguugaL96 | | Cfcauucuuscsc | | UCCUGGGUUGC | |
| AD-1631114 | asusuug(Ahd)AfcAfAf | 1082 | VPusAfscucu(G2p)gagcuu | 1441 | GAAUUUGAACAAG | 1800 |
| | GfcuccagaguaL96 | | GfuUfcaaaususc | | CUCCAGAGUU | |
| AD-1631125 | usgsuug(Ghd)UfgAfUf | 1083 | VPusGfsgcua(Agn)cuccau | 1442 | GAUGUUGGUGAU | 1801 |
| | GfgaguuagccaL96 | | CfaCfcaacasusc | | GGAGUUAGCCU | |
| AD-1628385 | asgscca(Uhd)gaUfUfAf | 1084 | VPusdCsucdGgdTauaudA | 1443 | UCAGCCAUGAUUA | 1802 |
| | uauaccgagaL96 | | aUfcauggcusgsa | | UAUACCGAGA | |
| AD-1628442 | csasaag(Ahd)uuGfCfUf | 1085 | VPusdGsccdGudAgucadG | 1444 | UGCAAAGAUUGCU | 1803 |
| | gacuacggcaL96 | | cAfaucuuugscsa | | GACUACGGCA | |
| AD-1631194 | gsasgga(Uhd)GfuGfGf | 1086 | VPusAfsaucu(Tgn)ugugcc | 1445 | GGGAGGAUGUGGC | 1804 |
| | CfacaaagauuaL96 | | AfcAfuccucscsc | | ACAAAGAUUU | |
| AD-1629263 | gsasgga(Uhd)guGfGfCf | 1087 | VPusdAsaudCudTugugdC | 1446 | GGGAGGAUGUGGC | 1805 |
| | acaaagauuaL96 | | cAfcauccucscsc | | ACAAAGAUUU | |

TABLE 6
Unmodified Sense and Antisense Strand Sequences of Human LRRK2 dsRNA Agents That
Use C16 Ligand or Unconjugated to a Ligand

| | Sense Sequence | SEQ ID | Range in | Antisense Sequence | SEQ ID | Range in |
|---|---|---|---|---|---|---|
| Duplex ID | 5′ to 3′ | NO: | NM_198578.4 | 5′ to 3′ | NO: | NM_198578.4 |
| AD-1807334 | CUUGUUUGUAUUGC | 1810 | 6872-6892 | UGGAAUTGCAAUA | 1900 | 6870-6892 |
| | AAUUCCA | | | CAAACAAGUG | | |
| AD-1807335 | GAAAGAGAUACAAU | 1811 | 7593-7613 | UAGCAAGAUUGTA | 1901 | 7591-7613 |
| | CUUGCUA | | | UCUCUUUCUG | | |
| AD-1807336 | CAUGAAGUGCAAAA | 1812 | 7639-7659 | UTCUAAAUUUUGC | 1902 | 7637-7659 |
| | UUUAGAA | | | ACUUCAUGUG | | |
| AD-1807337 | AAACACAAAAUGUC | 1813 | 7348-7368 | UGAATAAGACATU | 1903 | 7346-7368 |
| | UUAUUCA | | | UUGUGUUUUG | | |
| AD-1807338 | ACUCCAUUGAUGUG | 1814 | 7027-7047 | UCUCAAACACATCA | 1904 | 7025-7047 |
| | UUUGAGA | | | AUGGAGUAC | | |
| AD-1807339 | UAAAUCUUCCACAC | 1815 | 3713-3733 | UCCGCAAGUGUGG | 1905 | 3711-3733 |
| | UUGCGGA | | | AAGAUUUAAA | | |
| AD-1807340 | GCUGAAUUAGUCUG | 1816 | 6538-6558 | UGUCAGACAGACU | 1906 | 6536-6558 |
| | UCUGACA | | | AAUUCAGCUG | | |
| AD-1807341 | CUCAGCCAUGAUUA | 1817 | 6093-6113 | UGGUAUAUAAUCA | 1907 | 6091-6113 |
| | UAUACCA | | | UGGCUGAGUG | | |
| AD-1807342 | CUCAGCCAUGAUUA | 1818 | 6093-6113 | UGGUAUAUAAUCA | 1908 | 6091-6113 |
| | UAUACCA | | | UGGCUGAGUG | | |
| AD-1807343 | UCCAAAGAACUACA | 1819 | 5058-5078 | UGUGACAUGUAGU | 1909 | 5056-5078 |
| | UGUCACA | | | UCUUUGGAAA | | |
| AD-1807344 | UGGAUCUUUCAACU | 1820 | 7445-7465 | UTCGACGAGUUGA | 1910 | 7443-7465 |
| | CGUCGAA | | | AAGAUCCAGG | | |
| AD-1807345 | CUGCCUAGAAAUAU | 1821 | 5725-5745 | UAACAUAAUAUTU | 1911 | 5723-5745 |
| | UAUGUUA | | | CUAGGCAGGU | | |
| AD-1807346 | UAAGGGAACUCUUA | 1822 | 3800-3820 | UGCUAAAUAAGAG | 1912 | 3798-3820 |
| | UUUAGCA | | | UUCCCUUAAG | | |
| AD-1807347 | CUGGAUCUUUCAAC | 1823 | 7444-7464 | UCGACGAGUUGAA | 1913 | 7442-7464 |
| | UCGUCGA | | | AGAUCCAGGA | | |
| AD-1807348 | CUCUGAAAUUAUCA | 1824 | 5196-5216 | UGUCGGAUGAUAA | 1914 | 5194-5216 |
| | UCCGACA | | | UUUCAGAGUU | | |
| AD-1807349 | CAGCUGAAUUAGUC | 1825 | 6536-6556 | UCAGACAGACUAA | 1915 | 6534-6556 |
| | UGUCUGA | | | UUCAGCUGAA | | |
| AD-1807350 | CUUGUUUGUAUUGC | 1826 | 6872-6892 | UGGAAUTGCAATA | 1916 | 6870-6892 |
| | AAUUCCA | | | CAAACAAGUG | | |
| AD-1807351 | AAUCAGGAGUCCUU | 1827 | 4868-4888 | UAUGAAGAAGGAC | 1917 | 4866-4888 |
| | CUUCAUA | | | UCCUGAUUCA | | |
| AD-1807352 | GCUCACCAUUCCAA | 1828 | 5676-5696 | UGAGAUAUUGGAA | 1918 | 5674-5696 |
| | UAUCUCA | | | UGGUGAGCCU | | |
| AD-1807353 | CAAUCUUCCACAUG | 1829 | 7629-7649 | UGCACUTCAUGTGG | 1919 | 7627-7649 |
| | AAGUGCA | | | AAGAUUGAU | | |
| AD-1807354 | AAACACAAAAUGUC | 1830 | 7348-7368 | UGAAUAAGACAUU | 1920 | 7346-7368 |
| | UUAUUCA | | | UUGUGUUUUG | | |
| AD-1807355 | CCUGGAUCUUUCAA | 1831 | 7443-7463 | UGACGAGUUGAAA | 1921 | 7441-7463 |
| | CUCGUCA | | | GAUCCAGGAG | | |
| AD-1807356 | CUACUCUAUGACAU | 1832 | 6319-6339 | UGUCAAAAUGUCA | 1922 | 6317-6339 |
| | UUUGACA | | | UAGAGUAGUA | | |
| AD-1807357 | GCCUUGGUGCAUCU | 1833 | 6742-6762 | UACAGGAAGAUGC | 1923 | 6740-6762 |
| | UCCUGUA | | | ACCAAGGCUA | | |
| AD-1807358 | UUGCUGCUAUGCCU | 1834 | 3629-3649 | UCAAGAAAGGCAU | 1924 | 3627-3649 |
| | UUCUUGA | | | AGCAGCAAGA | | |
| AD-1807359 | AGUGAGAAAAGAAU | 1835 | 7671-7691 | UCAGCUAAUUCTU | 1925 | 7669-7691 |
| | UAGCUGA | | | UUCUCACUUC | | |
| AD-1807360 | AGAUCUCUUAGUAA | 1836 | 5646-5666 | UCUGGATUUACTA | 1926 | 5644-5666 |
| | AUCCAGA | | | AGAGAUCUCC | | |
| AD-1807361 | CACAAUGUGCUGCU | 1837 | 6127-6147 | UGUGAAAAGCAGC | 1927 | 6125-6147 |
| | UUUCACA | | | ACAUUGUGGG | | |
| AD-1807362 | GAAUUCAGCUGAAU | 1838 | 6531-6551 | UAGACUAAUUCAG | 1928 | 6529-6551 |
| | UAGUCUA | | | CUGAAUUCAA | | |
| AD-1807363 | CCAUUCAGAAACUC | 1839 | 7127-7147 | UCUCAATGAGUTUC | 1929 | 7125-7147 |
| | AUUGAGA | | | UGAAUGGUG | | |
| AD-1807364 | ACAUGAAGUGCAAA | 1840 | 7638-7658 | UCUAAATUUUGCA | 1930 | 7636-7658 |
| | AUUUAGA | | | CUUCAUGUGG | | |
| AD-1807365 | UGCUGCUAUGCCUU | 1841 | 3630-3650 | UGCAAGAAAGGCA | 1931 | 3628-3650 |
| | UCUUGCA | | | UAGCAGCAAG | | |
| AD-1807366 | GGGAAAAAGAGACA | 1842 | 6829-6849 | UAGGGUAUGUCUC | 1932 | 6827-6849 |
| | UACCCUA | | | UUUUUCCCAU | | |
| AD-1807367 | CAUUCCAAUAUCUC | 1843 | 5682-5702 | UCAATCTGAGATAU | 1933 | 5680-5702 |
| | AGAUUGA | | | UGGAAUGGU | | |
| AD-1807368 | AUGUGUUUGAGUGA | 1844 | 7036-7056 | UGUGGATUCACUC | 1934 | 7034-7056 |
| | AUCCACA | | | AAACACAUCA | | |
| AD-1807369 | AAAAUAUUAAGACA | 1845 | 8134-8154 | UGGAAACUGUCTU | 1935 | 8132-8154 |
| | GUUUCCA | | | AAUAUUUUCA | | |
| AD-1807370 | CAUUCCAAUAUCUC | 1846 | 5682-5702 | UCAAUCTGAGAUA | 1936 | 5680-5702 |
| | AGAUUGA | | | UUGGAAUGGU | | |
| AD-1807371 | GAAGCUUAUUGUCU | 1847 | 5368-5388 | UCCUACCAGACAA | 1937 | 5366-5388 |
| | GGUAGGA | | | UAAGCUUCAG | | |
| AD-1807372 | CAGUACUCCAUUGA | 1848 | 7023-7043 | UAACACAUCAAUG | 1938 | 7021-7043 |
| | UGUGUUA | | | GAGUACUGAC | | |
| AD-1807373 | AGUUUAACCUGUCA | 1849 | 3395-3415 | UGUUAUAUGACAG | 1939 | 3393-3415 |
| | UAUAACA | | | GUUAAACUGU | | |
| AD-1807374 | GACCUGCCUAGAAA | 1850 | 5722-5742 | UAUAAUAUUUCTA | 1940 | 5720-5742 |
| | UAUUAUA | | | GGCAGGUCAG | | |
| AD-1807375 | GUAGAGGGUUUGAA | 1851 | 6355-6375 | UGGAAACUUCAAA | 1941 | 6353-6375 |
| | GUUUCCA | | | CCCUCUACUA | | |
| AD-1807376 | GAAAGAGAUACAAU | 1852 | 7593-7613 | UAGCAAGAUUGUA | 1942 | 7591-7613 |
| | CUUGCUA | | | UCUCUUUCUG | | |
| AD-1807377 | CCUGGAUCUUUCAA | 1853 | 7443-7463 | UGACGAGUUGAAA | 1943 | 7441-7463 |
| | CUCGUCA | | | GAUCCAGGAG | | |
| AD-1807378 | UUUGAGUGAAUCCA | 1854 | 7041-7061 | UAAUUUGUGGAUU | 1944 | 7039-7061 |
| | CAAAUUA | | | CACUCAAACA | | |
| AD-1807379 | CUUGUUUGUAUUGC | 1855 | 6872-6892 | UGGAAUTGCAAUA | 1945 | 6870-6892 |
| | AAUUCCA | | | CAAACAAGUG | | |
| AD-1807380 | GAAAGAGAUACAAU | 1856 | 7593-7613 | UAGCAAGAUUGTA | 1946 | 7591-7613 |
| | CUUGCUA | | | UCUCUUUCUG | | |
| AD-1807381 | CAUGAAGUGCAAAA | 1857 | 7639-7659 | UTCUAAAUUUUGC | 1947 | 7637-7659 |
| | UUUAGAA | | | ACUUCAUGUG | | |
| AD-1807382 | AAACACAAAAUGUC | 1858 | 7348-7368 | UGAATAAGACATU | 1948 | 7346-7368 |
| | UUAUUCA | | | UUGUGUUUUG | | |
| AD-1807383 | ACUCCAUUGAUGUG | 1859 | 7027-7047 | UCUCAAACACATCA | 1949 | 7025-7047 |
| | UUUGAGA | | | AUGGAGUAC | | |
| AD-1807384 | UAAAUCUUCCACAC | 1860 | 3713-3733 | UCCGCAAGUGUGG | 1950 | 3711-3733 |
| | UUGCGGA | | | AAGAUUUAAA | | |
| AD-1807385 | GCUGAAUUAGUCUG | 1861 | 6538-6558 | UGUCAGACAGACU | 1951 | 6536-6558 |
| | UCUGACA | | | AAUUCAGCUG | | |
| AD-1807386 | CUCAGCCAUGAUUA | 1862 | 6093-6113 | UGGUAUAUAAUCA | 1952 | 6091-6113 |
| | UAUACCA | | | UGGCUGAGUG | | |
| AD-1807387 | CUCAGCCAUGAUUA | 1863 | 6093-6113 | UGGUAUAUAAUCA | 1953 | 6091-6113 |
| | UAUACCA | | | UGGCUGAGUG | | |
| AD-1807388 | UCCAAAGAACUACA | 1864 | 5058-5078 | UGUGACAUGUAGU | 1954 | 5056-5078 |
| | UGUCACA | | | UCUUUGGAAA | | |
| AD-1807389 | UGGAUCUUUCAACU | 1865 | 7445-7465 | UTCGACGAGUUGA | 1955 | 7443-7465 |
| | CGUCGAA | | | AAGAUCCAGG | | |
| AD-1807390 | CUGCCUAGAAAUAU | 1866 | 5725-5745 | UAACAUAAUAUTU | 1956 | 5723-5745 |
| | UAUGUUA | | | CUAGGCAGGU | | |
| AD-1807391 | UAAGGGAACUCUUA | 1867 | 3800-3820 | UGCUAAAUAAGAG | 1957 | 3798-3820 |
| | UUUAGCA | | | UUCCCUUAAG | | |
| AD-1807392 | CUGGAUCUUUCAAC | 1868 | 7444-7464 | UCGACGAGUUGAA | 1958 | 7442-7464 |
| | UCGUCGA | | | AGAUCCAGGA | | |
| AD-1807393 | CUCUGAAAUUAUCA | 1869 | 5196-5216 | UGUCGGAUGAUAA | 1959 | 5194-5216 |
| | UCCGACA | | | UUUCAGAGUU | | |
| AD-1807394 | CAGCUGAAUUAGUC | 1870 | 6536-6556 | UCAGACAGACUAA | 1960 | 6534-6556 |
| | UGUCUGA | | | UUCAGCUGAA | | |
| AD-1807395 | CUUGUUUGUAUUGC | 1871 | 6872-6892 | UGGAAUTGCAATA | 1961 | 6870-6892 |
| | AAUUCCA | | | CAAACAAGUG | | |
| AD-1807396 | AAUCAGGAGUCCUU | 1872 | 4868-4888 | UAUGAAGAAGGAC | 1962 | 4866-4888 |
| | CUUCAUA | | | UCCUGAUUCA | | |
| AD-1807397 | GCUCACCAUUCCAA | 1873 | 5676-5696 | UGAGAUAUUGGAA | 1963 | 5674-5696 |
| | UAUCUCA | | | UGGUGAGCCU | | |
| AD-1807398 | CAAUCUUCCACAUG | 1874 | 7629-7649 | UGCACUTCAUGTGG | 1964 | 7627-7649 |
| | AAGUGCA | | | AAGAUUGAU | | |
| AD-1807399 | AAACACAAAAUGUC | 1875 | 7348-7368 | UGAAUAAGACAUU | 1965 | 7346-7368 |
| | UUAUUCA | | | UUGUGUUUUG | | |
| AD-1807400 | CCUGGAUCUUUCAA | 1876 | 7443-7463 | UGACGAGUUGAAA | 1966 | 7441-7463 |
| | CUCGUCA | | | GAUCCAGGAG | | |
| AD-1807401 | CUACUCUAUGACAU | 1877 | 6319-6339 | UGUCAAAAUGUCA | 1967 | 6317-6339 |
| | UUUGACA | | | UAGAGUAGUA | | |
| AD-1807402 | GCCUUGGUGCAUCU | 1878 | 6742-6762 | UACAGGAAGAUGC | 1968 | 6740-6762 |
| | UCCUGUA | | | ACCAAGGCUA | | |
| AD-1807403 | UUGCUGCUAUGCCU | 1879 | 3629-3649 | UCAAGAAAGGCAU | 1969 | 3627-3649 |
| | UUCUUGA | | | AGCAGCAAGA | | |
| AD-1807404 | AGUGAGAAAAGAAU | 1880 | 7671-7691 | UCAGCUAAUUCTU | 1970 | 7669-7691 |
| | UAGCUGA | | | UUCUCACUUC | | |
| AD-1807405 | AGAUCUCUUAGUAA | 1881 | 5646-5666 | UCUGGATUUACTA | 1971 | 5644-5666 |
| | AUCCAGA | | | AGAGAUCUCC | | |
| AD-1807406 | CACAAUGUGCUGCU | 1882 | 6127-6147 | UGUGAAAAGCAGC | 1972 | 6125-6147 |
| | UUUCACA | | | ACAUUGUGGG | | |
| AD-1807407 | GAAUUCAGCUGAAU | 1883 | 6531-6551 | UAGACUAAUUCAG | 1973 | 6529-6551 |
| | UAGUCUA | | | CUGAAUUCAA | | |
| AD-1807408 | CCAUUCAGAAACUC | 1884 | 7127-7147 | UCUCAATGAGUTUC | 1974 | 7125-7147 |
| | AUUGAGA | | | UGAAUGGUG | | |
| AD-1807409 | ACAUGAAGUGCAAA | 1885 | 7638-7658 | UCUAAATUUUGCA | 1975 | 7636-7658 |
| | AUUUAGA | | | CUUCAUGUGG | | |
| AD-1807410 | UGCUGCUAUGCCUU | 1886 | 3630-3650 | UGCAAGAAAGGCA | 1976 | 3628-3650 |
| | UCUUGCA | | | UAGCAGCAAG | | |
| AD-1807411 | GGGAAAAAGAGACA | 1887 | 6829-6849 | UAGGGUAUGUCUC | 1977 | 6827-6849 |
| | UACCCUA | | | UUUUUCCCAU | | |
| AD-1807412 | CAUUCCAAUAUCUC | 1888 | 5682-5702 | UCAATCTGAGATAU | 1978 | 5680-5702 |
| | AGAUUGA | | | UGGAAUGGU | | |
| AD-1807413 | AUGUGUUUGAGUGA | 1889 | 7036-7056 | UGUGGATUCACUC | 1979 | 7034-7056 |
| | AUCCACA | | | AAACACAUCA | | |
| AD-1807414 | AAAAUAUUAAGACA | 1890 | 8134-8154 | UGGAAACUGUCTU | 1980 | 8132-8154 |
| | GUUUCCA | | | AAUAUUUUCA | | |
| AD-1807415 | CAUUCCAAUAUCUC | 1891 | 5682-5702 | UCAAUCTGAGAUA | 1981 | 5680-5702 |
| | AGAUUGA | | | UUGGAAUGGU | | |
| AD-1807416 | GAAGCUUAUUGUCU | 1892 | 5368-5388 | UCCUACCAGACAA | 1982 | 5366-5388 |
| | GGUAGGA | | | UAAGCUUCAG | | |
| AD-1807417 | CAGUACUCCAUUGA | 1893 | 7023-7043 | UAACACAUCAAUG | 1983 | 7021-7043 |
| | UGUGUUA | | | GAGUACUGAC | | |
| AD-1807418 | AGUUUAACCUGUCA | 1894 | 3395-3415 | UGUUAUAUGACAG | 1984 | 3393-3415 |
| | UAUAACA | | | GUUAAACUGU | | |
| AD-1807419 | GACCUGCCUAGAAA | 1895 | 5722-5742 | UAUAAUAUUUCTA | 1985 | 5720-5742 |
| | UAUUAUA | | | GGCAGGUCAG | | |
| AD-1807420 | GUAGAGGGUUUGAA | 1896 | 6355-6375 | UGGAAACUUCAAA | 1986 | 6353-6375 |
| | GUUUCCA | | | CCCUCUACUA | | |
| AD-1807421 | GAAAGAGAUACAAU | 1897 | 7593-7613 | UAGCAAGAUUGUA | 1987 | 7591-7613 |
| | CUUGCUA | | | UCUCUUUCUG | | |
| AD-1807422 | CCUGGAUCUUUCAA | 1898 | 7443-7463 | UGACGAGUUGAAA | 1988 | 7441-7463 |
| | CUCGUCA | | | GAUCCAGGAG | | |
| AD-1807423 | UUUGAGUGAAUCCA | 1899 | 7041-7061 | UAAUUUGUGGAUU | 1989 | 7039-7061 |
| | CAAAUUA | | | CACUCAAACA | | |

TABLE 7
Modified Sense and Antisense Strand Sequences of Human LRRK2 dsRNA Agents That Use
C16 Ligand or Unconjugated to a Ligand

| | Sense Sequence | SEQ | Antisense Sequence | SEQ | mRNA Target Sequence | SEQ |
|---|---|---|---|---|---|---|
| Duplex ID | 5′ to 3′ | ID NO: | 5′ to 3′ | ID NO: | 5′ to 3′ | ID NO: |
| AD-1807334 | csusugu(Uhd)UfgUfAf | 1990 | VPusGfsgadAu(Tgn)gcaa | 2080 | CACUUGUUUGUAUU | 2170 |
| | Ufugcaauucscsa | | uaCfaAfacaagsusg | | GCAAUUCCU | |
| AD-1807335 | gsasaag(Ahd)gaUfAfC | 1991 | VPusdAsgcdAadGauugd | 2081 | CAGAAAGAGAUACA | 2171 |
| | faaucuugcsusa | | TaUfcucuuucsusg | | AUCUUGCUU | |
| AD-1807336 | csasuga(Ahd)guGfCfA | 1992 | VPusdTscudAadAuuuud | 2082 | CACAUGAAGUGCAA | 2172 |
| | faaauuuagsasa | | GcAfcuucaugsusg | | AAUUUAGAA | |
| AD-1807337 | asasaca(Chd)aaAfAfU | 1993 | VPusdGsaadTadAgacadT | 2083 | CAAAACACAAAAUG | 2173 |
| | fgucuuauuscsa | | uUfuguguuususg | | UCUUAUUCU | |
| AD-1807338 | ascsucc(Ahd)uuGfAfU | 1994 | VPusdCsucdAadAcacadT | 2084 | GUACUCCAUUGAUG | 2174 |
| | fguguuugasgsa | | cAfauggagusasc | | UGUUUGAGU | |
| AD-1807339 | usasaau(Chd)uuCfCfA | 1995 | VPusdCscgdCadAgugud | 2085 | UUUAAAUCUUCCAC | 2175 |
| | fcacuugcgsgsa | | GgAfagauuuasasa | | ACUUGCGGU | |
| AD-1807340 | gscsuga(Ahd)UfuAfGf | 1996 | VPusGfsucdAg(Agn)caga | 2086 | CAGCUGAAUUAGUC | 2176 |
| | Ufcugucugascsa | | cuAfaUfucagcsusg | | UGUCUGACG | |
| AD-1807341 | csuscag(Chd)caUfGfA | 1997 | VPusdGsgudAudAuaaud | 2087 | CACUCAGCCAUGAUU | 2177 |
| | fuuauauacscsa | | CaUfggcugagsusg | | AUAUACCG | |
| AD-1807342 | csuscag(Chd)CfaUfGf | 1998 | VPusGfsgudAu(Agn)uaa | 2088 | CACUCAGCCAUGAUU | 2178 |
| | Afuuauauacscsa | | ucaUfgGfcugagsusg | | AUAUACCG | |
| AD-1807343 | uscscaa(Ahd)GfaAfCf | 1999 | VPusGfsugdAc(Agn)ugu | 2089 | UUUCCAAAGAACUA | 2179 |
| | Ufacaugucascsa | | aguUfcUfuuggasasa | | CAUGUCACA | |
| AD-1807344 | usgsgau(Chd)uuUfCfA | 2000 | VPusdTscgdAcdGaguud | 2090 | CCUGGAUCUUUCAAC | 2180 |
| | facucgucgsasa | | GaAfagauccasgsg | | UCGUCGAC | |
| AD-1807345 | csusgcc(Uhd)agAfAfA | 2001 | VPusdAsacdAudAauaud | 2091 | ACCUGCCUAGAAAU | 2181 |
| | fuauuaugususa | | TuCfuaggcagsgsu | | AUUAUGUUG | |
| AD-1807346 | usasagggaaCfUfCfuua | 2002 | VPusdGscudAadAuaagd | 2092 | CUUAAGGGAACUCU | 2182 |
| | u(Uhd)uagscsa | | AgUfucccuuasasg | | UAUUUAGCC | |
| AD-1807347 | csusgga(Uhd)cuUfUfC | 2003 | VPusdCsgadCgdAguugd | 2093 | UCCUGGAUCUUUCA | 2183 |
| | faacucgucsgsa | | AaAfgauccagsgsa | | ACUCGUCGA | |
| AD-1807348 | csuscug(Ahd)AfaUfUf | 2004 | VPusGfsucdGg(Agn)uga | 2094 | AACUCUGAAAUUAU | 2184 |
| | Afucauccgascsa | | uaaUfuUfcagagsusu | | CAUCCGACU | |
| AD-1807349 | csasgc(Uhd)gaaUfUfA | 2005 | VPusdCsagdAcdAgacud | 2095 | UUCAGCUGAAUUAG | 2185 |
| | fgucugucusgsa | | AaUfucagcugsasa | | UCUGUCUGA | |
| AD-1807350 | csusugu(Uhd)ugUfAf | 2006 | VPusdGsgadAudTgcaadT | 2096 | CACUUGUUUGUAUU | 2186 |
| | Ufugcaauucscsa | | aCfaaacaagsusg | | GCAAUUCCU | |
| AD-1807351 | asasucaggaGfUfCfcuu | 2007 | VPusdAsugdAadGaaggd | 2097 | UGAAUCAGGAGUCC | 2187 |
| | c(Uhd)ucasusa | | AcUfccugauuscsa | | UUCUUCAUU | |
| AD-1807352 | gscsuca(Chd)caUfUfC | 2008 | VPusdGsagdAudAuuggd | 2098 | AGGCUCACCAUUCCA | 2188 |
| | fcaauaucuscsa | | AaUfggugagcscsu | | AUAUCUCA | |
| AD-1807353 | csasauc(Uhd)ucCfAfC | 2009 | VPusdGscadCudTcaugdT | 2099 | AUCAAUCUUCCACAU | 2189 |
| | faugaagugscsa | | gGfaagauugsasu | | GAAGUGCA | |
| AD-1807354 | asasaca(Chd)AfaAfAf | 2010 | VPusGfsaadTa(Agn)gaca | 2100 | CAAAACACAAAAUG | 2190 |
| | Ufgucuuauuscsa | | uuUfuGfuguuususg | | UCUUAUUCU | |
| AD-1807355 | cscsugg(Ahd)ucUfUfU | 2011 | VPusdGsacdGadGuugad | 2101 | CUCCUGGAUCUUUCA | 2191 |
| | fcaacucguscsa | | AaGfauccaggsasg | | ACUCGUCG | |
| AD-1807356 | csusacu(Chd)uaUfGfA | 2012 | VPusdGsucdAadAaugud | 2102 | UACUACUCUAUGAC | 2192 |
| | fcauuuugascsa | | CaUfagaguagsusa | | AUUUUGACA | |
| AD-1807357 | gscscu(Uhd)gGfuGfCf | 2013 | VPusAfscadGg(Agn)agau | 2103 | UAGCCUUGGUGCAU | 2193 |
| | Afucuuccugsusa | | gcAfcCfaaggcsusa | | CUUCCUGUU | |
| AD-1807358 | ususgcug(Chd)uAfUf | 2014 | VPusdCsaadGadAaggcd | 2104 | UCUUGCUGCUAUGCC | 2194 |
| | Gfccuuucuusgsa | | AuAfgcagcaasgsa | | UUUCUUGC | |
| AD-1807359 | asgsugagaaAfAfGfaau | 2015 | VPusdCsagdCudAauucdT | 2105 | GAAGUGAGAAAAGA | 2195 |
| | (Uhd)agcusgsa | | uUfucucacususc | | AUUAGCUGA | |
| AD-1807360 | asgsauc(Uhd)cuUfAfG | 2016 | VPusdCsugdGadTuuacdT | 2106 | GGAGAUCUCUUAGU | 2196 |
| | fuaaauccasgsa | | aAfgagaucuscsc | | AAAUCCAGA | |
| AD-1807361 | csascaa(Uhd)guGfCfU | 2017 | VPusdGsugdAadAagcad | 2107 | CCCACAAUGUGCUGC | 2197 |
| | fgcuuuucascsa | | GcAfcauugugsgsg | | UUUUCACA | |
| AD-1807362 | gsasauu(Chd)agCfUfG | 2018 | VPusdAsgadCudAauucd | 2108 | UUGAAUUCAGCUGA | 2198 |
| | faauuagucsusa | | AgCfugaauucsasa | | AUUAGUCUG | |
| AD-1807363 | cscsauu(Chd)agAfAfA | 2019 | VPusdCsucdAadTgagudT | 2109 | CACCAUUCAGAAACU | 2199 |
| | fcucauugasgsa | | uCfugaauggsusg | | CAUUGAGA | |
| AD-1807364 | ascsaug(Ahd)agUfGfC | 2020 | VPusdCsuadAadTuuugd | 2110 | CCACAUGAAGUGCA | 2200 |
| | faaaauuuasgsa | | CaCfuucaugusgsg | | AAAUUUAGA | |
| AD-1807365 | usgscug(Chd)uaUfGfC | 2021 | VPusdGscadAgdAaaggd | 2111 | CUUGCUGCUAUGCCU | 2201 |
| | fcuuucuugscsa | | CaUfagcagcasasg | | UUCUUGCC | |
| AD-1807366 | gsgsgaa(Ahd)AfaGfAf | 2022 | VPusAfsggdGu(Agn)ugu | 2112 | AUGGGAAAAAGAGA | 2202 |
| | Gfacauacccsusa | | cucUfuUfuucccsasu | | CAUACCCUA | |
| AD-1807367 | csasuuc(Chd)aaUfAfU | 2023 | VPusdCsaadTcdTgagadT | 2113 | ACCAUUCCAAUAUCU | 2203 |
| | fcucagauusgsa | | aUfuggaaugsgsu | | CAGAUUGC | |
| AD-1807368 | asusgug(Uhd)UfuGfAf | 2024 | VPusGfsugdGa(Tgn)ucac | 2114 | UGAUGUGUUUGAGU | 2204 |
| | Gfugaauccascsa | | ucAfaAfcacauscsa | | GAAUCCACA | |
| AD-1807369 | asasaau(Ahd)uuAfAfG | 2025 | VPusdGsgadAadCugucd | 2115 | UGAAAAUAUUAAGA | 2205 |
| | facaguuucscsa | | TuAfauauuuuscsa | | CAGUUUCCC | |
| AD-1807370 | csasuuc(Chd)AfaUfAf | 2026 | VPusCfsaadTc(Tgn)gaga | 2116 | ACCAUUCCAAUAUCU | 2206 |
| | Ufcucagauusgsa | | uaUfuGfgaaugsgsu | | CAGAUUGC | |
| AD-1807371 | gsasagc(Uhd)uaUfUfG | 2027 | VPusdCscudAcdCagacdA | 2117 | CUGAAGCUUAUUGU | 2207 |
| | fucugguagsgsa | | aUfaagcuucsasg | | CUGGUAGGA | |
| AD-1807372 | csasgua(Chd)UfcCfAf | 2028 | VPusAfsacdAc(Agn)ucaa | 2118 | GUCAGUACUCCAUU | 2208 |
| | Ufugaugugususa | | ugGfaGfuacugsasc | | GAUGUGUUU | |
| AD-1807373 | asgsuuu(Ahd)acCfUfG | 2029 | VPusdGsuudAudAugacd | 2119 | ACAGUUUAACCUGU | 2209 |
| | fucauauaascsa | | AgGfuuaaacusgsu | | CAUAUAACC | |
| AD-1807374 | gsasccug(Chd)cUfAfG | 2030 | VPusdAsuadAudAuuucd | 2120 | CUGACCUGCCUAGAA | 2210 |
| | faaauauuasusa | | TaGfgcaggucsasg | | AUAUUAUG | |
| AD-1807375 | gsusagagGfgUfUfUfga | 2031 | VPusGfsgadAa(C2p)uuca | 2121 | UAGUAGAGGGUUUG | 2211 |
| | ag(Uhd)uucscsa | | aaCfcCfucuacsusa | | AAGUUUCCA | |
| AD-1807376 | gsasaag(Ahd)GfaUfAf | 2032 | VPusAfsgcdAa(G2p)auug | 2122 | CAGAAAGAGAUACA | 2212 |
| | Cfaaucuugcsusa | | uaUfcUfcuuucsusg | | AUCUUGCUU | |
| AD-1807377 | cscsugg(Ahd)UfcUfUf | 2033 | VPusGfsacdGa(G2p)uuga | 2123 | CUCCUGGAUCUUUCA | 2213 |
| | Ufcaacucguscsa | | aaGfaUfccaggsasg | | ACUCGUCG | |
| AD-1807378 | ususugag(Uhd)gAfAf | 2034 | VPusAfsaudTu(G2p)ugga | 2124 | UGUUUGAGUGAAUC | 2214 |
| | Ufccacaaaususa | | uuCfaCfucaaascsa | | CACAAAUUC | |
| AD-1807379 | csusuguuUfgUfAfUfu | 2035 | VPusGfsgadAu(Tgn)gcaa | 2125 | CACUUGUUUGUAUU | 2215 |
| | gcaauucscsa | | uaCfaAfacaagsusg | | GCAAUUCCU | |
| AD-1807380 | gsasaagagaUfAfCfaau | 2036 | VPusdAsgcdAadGauugd | 2126 | CAGAAAGAGAUACA | 2216 |
| | cuugcsusa | | TaUfcucuuucsusg | | AUCUUGCUU | |
| AD-1807381 | csasugaaguGfCfAfaaa | 2037 | VPusdTscudAadAuuuud | 2127 | CACAUGAAGUGCAA | 2217 |
| | uuuagsasa | | GcAfcuucaugsusg | | AAUUUAGAA | |
| AD-1807382 | asasacacaaAfAfUfguc | 2038 | VPusdGsaadTadAgacadT | 2128 | CAAAACACAAAAUG | 2218 |
| | uuauuscsa | | uUfuguguuususg | | UCUUAUUCU | |
| AD-1807383 | ascsuccauuGfAfUfgug | 2039 | VPusdCsucdAadAcacadT | 2129 | GUACUCCAUUGAUG | 2219 |
| | uuugasgsa | | cAfauggagusasc | | UGUUUGAGU | |
| AD-1807384 | usasaaucuuCfCfAfcac | 2040 | VPusdCscgdCadAgugud | 2130 | UUUAAAUCUUCCAC | 2220 |
| | uugcgsgsa | | GgAfagauuuasasa | | ACUUGCGGU | |
| AD-1807385 | gscsugaaUfuAfGfUfcu | 2041 | VPusGfsucdAg(Agn)caga | 2131 | CAGCUGAAUUAGUC | 2221 |
| | gucugascsa | | cuAfaUfucagcsusg | | UGUCUGACG | |
| AD-1807386 | csuscagccaUfGfAfuua | 2042 | VPusdGsgudAudAuaaud | 2132 | CACUCAGCCAUGAUU | 2222 |
| | uauacscsa | | CaUfggcugagsusg | | AUAUACCG | |
| AD-1807387 | csuscagcCfaUfGfAfuu | 2043 | VPusGfsgudAu(Agn)uaa | 2133 | CACUCAGCCAUGAUU | 2223 |
| | auauacscsa | | ucaUfgGfcugagsusg | | AUAUACCG | |
| AD-1807388 | uscscaaaGfaAfCfUfac | 2044 | VPusGfsugdAc(Agn)ugu | 2134 | UUUCCAAAGAACUA | 2224 |
| | augucascsa | | aguUfcUfuuggasasa | | CAUGUCACA | |
| AD-1807389 | usgsgaucuuUfCfAfacu | 2045 | VPusdTscgdAcdGaguud | 2135 | CCUGGAUCUUUCAAC | 2225 |
| | cgucgsasa | | GaAfagauccasgsg | | UCGUCGAC | |
| AD-1807390 | csusgccuagAfAfAfuau | 2046 | VPusdAsacdAudAauaud | 2136 | ACCUGCCUAGAAAU | 2226 |
| | uaugususa | | TuCfuaggcagsgsu | | AUUAUGUUG | |
| AD-1807391 | usasagggaaCfUfCfuua | 2047 | VPusdGscudAadAuaagd | 2137 | CUUAAGGGAACUCU | 2227 |
| | uuuagscsa | | AgUfucccuuasasg | | UAUUUAGCC | |
| AD-1807392 | csusggaucuUfUfCfaac | 2048 | VPusdCsgadCgdAguugd | 2138 | UCCUGGAUCUUUCA | 2228 |
| | ucgucsgsa | | AaAfgauccagsgsa | | ACUCGUCGA | |
| AD-1807393 | csuscugaAfaUfUfAfuc | 2049 | VPusGfsucdGg(Agn)uga | 2139 | AACUCUGAAAUUAU | 2229 |
| | auccgascsa | | uaaUfuUfcagagsusu | | CAUCCGACU | |
| AD-1807394 | csasgcugaaUfUfAfguc | 2050 | VPusdCsagdAcdAgacud | 2140 | UUCAGCUGAAUUAG | 2230 |
| | ugucusgsa | | AaUfucagcugsasa | | UCUGUCUGA | |
| AD-1807395 | csusuguuugUfAfUfugc | 2051 | VPusdGsgadAudTgcaadT | 2141 | CACUUGUUUGUAUU | 2231 |
| | aauucscsa | | aCfaaacaagsusg | | GCAAUUCCU | |
| AD-1807396 | asasucaggaGfUfCfcuu | 2052 | VPusdAsugdAadGaaggd | 2142 | UGAAUCAGGAGUCC | 2232 |
| | cuucasusa | | AcUfccugauuscsa | | UUCUUCAUU | |
| AD-1807397 | gscsucaccaUfUfCfcaa | 2053 | VPusdGsagdAudAuuggd | 2143 | AGGCUCACCAUUCCA | 2233 |
| | uaucuscsa | | AaUfggugagcscsu | | AUAUCUCA | |
| AD-1807398 | csasaucuucCfAfCfaug | 2054 | VPusdGscadCudTcaugdT | 2144 | AUCAAUCUUCCACAU | 2234 |
| | aagugscsa | | gGfaagauugsasu | | GAAGUGCA | |
| AD-1807399 | asasacacAfaAfAfUfgu | 2055 | VPusGfsaadTa(Agn)gaca | 2145 | CAAAACACAAAAUG | 2235 |
| | cuuauuscsa | | uuUfuGfuguuususg | | UCUUAUUCU | |
| AD-1807400 | cscsuggaucUfUfUfcaa | 2056 | VPusdGsacdGadGuugad | 2146 | CUCCUGGAUCUUUCA | 2236 |
| | cucguscsa | | AaGfauccaggsasg | | ACUCGUCG | |
| AD-1807401 | csusacucuaUfGfAfcau | 2057 | VPusdGsucdAadAaugud | 2147 | UACUACUCUAUGAC | 2237 |
| | uuugascsa | | CaUfagaguagsusa | | AUUUUGACA | |
| AD-1807402 | gscscuugGfuGfCfAfuc | 2058 | VPusAfscadGg(Agn)agau | 2148 | UAGCCUUGGUGCAU | 2238 |
| | uuccugsusa | | gcAfcCfaaggcsusa | | CUUCCUGUU | |
| AD-1807403 | ususgcugcuAfUfGfccu | 2059 | VPusdCsaadGadAaggcd | 2149 | UCUUGCUGCUAUGCC | 2239 |
| | uucuusgsa | | AuAfgcagcaasgsa | | UUUCUUGC | |
| AD-1807404 | asgsugagaaAfAfGfaau | 2060 | VPusdCsagdCudAauucdT | 2150 | GAAGUGAGAAAAGA | 2240 |
| | uagcusgsa | | uUfucucacususc | | AUUAGCUGA | |
| AD-1807405 | asgsaucucuUfAfGfuaa | 2061 | VPusdCsugdGadTuuacdT | 2151 | GGAGAUCUCUUAGU | 2241 |
| | auccasgsa | | laAfgagaucuscsc | | AAAUCCAGA | |
| AD-1807406 | csascaauguGfCfUfgcu | 2062 | VPusdGsugdAadAagcad | 2152 | CCCACAAUGUGCUGC | 2242 |
| | uuucascsa | | GcAfcauugugsgsg | | UUUUCACA | |
| AD-1807407 | gsasauucagCfUfGfaau | 2063 | VPusdAsgadCudAauucd | 2153 | UUGAAUUCAGCUGA | 2243 |
| | uagucsusa | | AgCfugaauucsasa | | AUUAGUCUG | |
| AD-1807408 | cscsauucagAfAfAfcuc | 2064 | VPusdCsucdAadTgagudT | 2154 | CACCAUUCAGAAACU | 2244 |
| | auugasgsa | | uCfugaauggsusg | | CAUUGAGA | |
| AD-1807409 | ascsaugaagUfGfCfaaa | 2065 | VPusdCsuadAadTuuugd | 2155 | CCACAUGAAGUGCA | 2245 |
| | auuuasgsa | | CaCfuucaugusgsg | | AAAUUUAGA | |
| AD-1807410 | usgscugcuaUfGfCfcuu | 2066 | VPusdGscadAgdAaaggd | 2156 | CUUGCUGCUAUGCCU | 2246 |
| | ucuugscsa | | CaUfagcagcasasg | | UUCUUGCC | |
| AD-1807411 | gsgsgaaaAfaGfAfGfac | 2067 | VPusAfsggdGu(Agn)ugu | 2157 | AUGGGAAAAAGAGA | 2247 |
| | auacccsusa | | cucUfuUfuucccsasu | | CAUACCCUA | |
| AD-1807412 | csasuuccaaUfAfUfcuc | 2068 | VPusdCsaadTcdTgagadT | 2158 | ACCAUUCCAAUAUCU | 2248 |
| | agauusgsa | | aUfuggaaugsgsu | | CAGAUUGC | |
| AD-1807413 | asusguguUfuGfAfGfu | 2069 | VPusGfsugdGa(Tgn)ucac | 2159 | UGAUGUGUUUGAGU | 2249 |
| | gaauccascsa | | ucAfaAfcacauscsa | | GAAUCCACA | |
| AD-1807414 | asasaauauuAfAfGfaca | 2070 | VPusdGsgadAadCugucd | 2160 | UGAAAAUAUUAAGA | 2250 |
| | guuucscsa | | TuAfauauuuuscsa | | CAGUUUCCC | |
| AD-1807415 | csasuuccAfaUfAfUfcu | 2071 | VPusCfsaadTc(Tgn)gaga | 2161 | ACCAUUCCAAUAUCU | 2251 |
| | cagauusgsa | | uaUfuGfgaaugsgsu | | CAGAUUGC | |
| AD-1807416 | gsasagcuuaUfUfGfucu | 2072 | VPusdCscudAcdCagacdA | 2162 | CUGAAGCUUAUUGU | 2252 |
| | gguagsgsa | | aUfaagcuucsasg | | CUGGUAGGA | |
| AD-1807417 | csasguacUfcCfAfUfug | 2073 | VPusAfsacdAc(Agn)ucaa | 2163 | GUCAGUACUCCAUU | 2253 |
| | augugususa | | ugGfaGfuacugsasc | | GAUGUGUUU | |
| AD-1807418 | asgsuuuaacCfUfGfuca | 2074 | VPusdGsuudAudAugacd | 2164 | ACAGUUUAACCUGU | 2254 |
| | uauaascsa | | AgGfuuaaacusgsu | | CAUAUAACC | |
| AD-1807419 | gsasccugccUfAfGfaaa | 2075 | VPusdAsuadAudAuuucd | 2165 | CUGACCUGCCUAGAA | 2255 |
| | uauuasusa | | TaGfgcaggucsasg | | AUAUUAUG | |
| AD-1807420 | gsusagagGfgUfUfUfga | 2076 | VPusGfsgadAa(C2p)uuca | 2166 | UAGUAGAGGGUUUG | 2256 |
| | aguuucscsa | | aaCfcCfucuacsusa | | AAGUUUCCA | |
| AD-1807421 | gsasaagaGfaUfAfCfaa | 2077 | VPusAfsgcdAa(G2p)auug | 2167 | CAGAAAGAGAUACA | 2257 |
| | ucuugcsusa | | uaUfcUfcuuucsusg | | AUCUUGCUU | |
| AD-1807422 | cscsuggaUfcUfUfUfca | 2078 | VPusGfsacdGa(G2p)uuga | 2168 | CUCCUGGAUCUUUCA | 2258 |
| | acucguscsa | | aaGfaUfccaggsasg | | ACUCGUCG | |
| AD-1807423 | ususugagugAfAfUfcca | 2079 | VPusAfsaudTu(G2p)ugga | 2169 | UGUUUGAGUGAAUC | 2259 |
| | caaaususa | | uuCfaCfucaaascsa | | CACAAAUUC | |

### Example 2. In Vitro Evaluation of LRRK2 siRNA

### Experimental Methods

i. Lung elpithelial cell culture and transfections: Human Lung Epithelial cells A549 (ATCC) were transfected by adding approximately 5 μl of 1 ng/μl, diluted in Opti-MEM, 4.9 μl of Opti-MEM plus 0.1 d of Lipofectamine 2000 per well (Invitrogen, Carlsbad CA. cat #11668-019) to 5 μl of siRNA duplexes per well, with approximately 4 replicates of each siRNA duplex, into a 384-well plate, and the cells were then incubated at room temperature for about 15 minutes. siRNA duplexes without a ligand, as well as siRNA duplexes with a C16 ligand were tested. Three dose experiments were performed at 10 nM, 1 nM, and 0.1 nM.
ii. Hepatocyte Cell Culture and Transfections:

[0725] Primary mouse hepatocytes (PMH) were transfected by adding 5 di of 1 ng/μl, diluted in Opti-MEM, 4.9 μl of Opti-MEM plus 0.1 μl of Lipofectamine 2000 per well (Invitrogen, Carlsbad CA. cat #11668-019) to 5 μl of siRNA duplexes per well, with approximately 4 replicates of each siRNA duplex, into a 384-well plate, and the cells were then incubated at room temperature for 15 minutes. Thirty-five d of Dulbecco's Modified Eagle Medium (ThermoFisher) containing ˜5×10³ cells was then added to the siRNA mixture. Three dose experiments were performed at 10 nM, 1 nM, and 0.1M.

iii. Total RNA Isolation Using DYNABEADS mRNA Isolation Kit:

[0726] RNA was isolated using an automated protocol on a BioTek-EL406 platform using DYNABEADs (Invitrogen, cat #61012). Briefly, 70 μl of Lysis/Binding Buffer and 10 μl of lysis buffer containing 3 μl of magnetic beads were added to the plate with cells. Plates were incubated on an electromagnetic shaker for 10 minutes at room temperature and then magnetic beads were captured and the supernatant is removed. Bead-bound RNA was then washed 2 times with 150 μl Wash Buffer A and once with Wash Buffer B. Beads were then washed with 150 μl Elution Buffer, re-captured and the supernatant removed. The plates were loaded to the BioTek for RNA purification.

iv. cDNA Synthesis Using ABI High Capacity cDNA Reverse Transcription Kit (Applied Biosystems, Foster City. CA, Cat #4368813):

[0727] Ten μl of a master mix containing 1 μl 10× Buffer, 0.4 μl 25× dNTPs, 1 μl 10× Random primers, 0.5 μl Reverse Transcriptase, 0.5 μl RNase inhibitor and 6.6 g of H2O per reaction were added to the isolated RNA. Plates were then sealed, mixed, and incubated on an electromagnetic shaker for 10 minutes at room temperature, followed by 2h 37° C. The plate was stored in −20° C. until it is ready for qPCR.

v. Real Time PCR:

[0728] Two μl of cDNA and 5 μl Lightcycler 480 probe master mix (Roche Cat #04887301001) were added to either 0.5-1 μl of Human GAPDH TaqMan Probe (4326317E) and 0.5-1 μl human LRRK2 probe (Hs01115057_ml, Hs00968198, or Hs00411197, Thermo) or 0.5-1 μl Mouse GAPDH TaqMan Probe (4352339E) and 0.5-1 μl mouse Lrrk2 probe (Mm00481934_ml) per well in 384 well plates (Roche cat #04887301001). Real time PCR was performed using a LightCycler480 Real Time PCR system (Roche). Each duplex was tested at least two times and data was normalized to cells transfected with a non-targeting control siRNA. To calculate relative fold change, real time data was analyzed using the ΔΔCt method and was normalized to assays performed with cells transfected with a non-targeting control siRNA.

### Results

i. Dose Screen of LRRK dsRNA Agents

[0729] The results of the dose screen 1 in A549 cells with exemplary LRRK2 siRNAs of Tables 3 and 4 are shown in Table 8. The results of the dose screen 2 in A549 cells with exemplary LRRK2 siRNAs of Table 6, conjugated to a C16-ligand or unconjugated to a ligand, are shown in Tables 9 and 10, respectively. The results in Tables 9 and 10, expressed as average % LRRK2 mRNA remaining, were obtained during an RNAseq analysis at a duplex concentration of 10 nM. In Table 9, the parent (i.e., L96-conjugated) dsRNA data were calculated based on the in vitro data in Table 8. The data are expressed as percent message remaining relative to the non-targeting control.

TABLE 8
Dose Screens of LRRK2 dsRNA Agents
(L96-Conjugated) in A549 Cells

| | 10 nM Dose | | 1 nM Dose | | 0.1 nM Dose | |
|---|---|---|---|---|---|---|
| | Avg % | | Avg % | | Avg % | |
| | LRRK2 | | LRRK2 | | LRRK2 | |
| | mRNA | | mRNA | | mRNA | |
| Duplex | Remaining | SD | Remaining | SD | Remaining | SD |
| AD-1624152 | 40 | 4 | 94 | 8 | 95 | 2 |
| AD-1624178 | 36 | 2 | 62 | 5 | 80 | 5 |
| AD-1631019 | 93 | 3 | 83 | 10 | 95 | 5 |
| AD-1631020 | 57 | 6 | 85 | 2 | 86 | 6 |
| AD-1631021 | 65 | 7 | 98 | 12 | 101 | 7 |
| AD-1624412 | 51 | 1 | 94 | 7 | 103 | 12 |
| AD-1631022 | 58 | 3 | 93 | 7 | 93 | 3 |
| AD-1631023 | 88 | 12 | 111 | 6 | 120 | 10 |
| AD-1631024 | 93 | 13 | 100 | 13 | 111 | 15 |
| AD-1631025 | 37 | 5 | 63 | 4 | 84 | 7 |
| AD-1624595 | 42 | 5 | 70 | 12 | 77 | 15 |
| AD-1631026 | 61 | 2 | 108 | 6 | 110 | 11 |
| AD-1624721 | 45 | 8 | 102 | 13 | 102 | 13 |
| AD-1624739 | 45 | 1 | 84 | 3 | 89 | 6 |
| AD-1631027 | 54 | 6 | 115 | 15 | 105 | 8 |
| AD-1624856 | 45 | 7 | 98 | 9 | 107 | 6 |
| AD-1631028 | 64 | 10 | 100 | 7 | 119 | 6 |
| AD-1624857 | 44 | 8 | 79 | 6 | 95 | 8 |
| AD-1631029 | 75 | 5 | 99 | 6 | 91 | 6 |
| AD-1624894 | 57 | 5 | 111 | 8 | 95 | 6 |
| AD-1631030 | 34 | 5 | 71 | 7 | 104 | 21 |
| AD-1625057 | 35 | 4 | 87 | 2 | 93 | 17 |
| AD-1625155 | 73 | 9 | 99 | 4 | 106 | 11 |
| AD-1631031 | 78 | 14 | 104 | 6 | 107 | 8 |
| AD-1625191 | 59 | 8 | 101 | 12 | 93 | 12 |
| AD-1631032 | 77 | 14 | 92 | 7 | 95 | 7 |
| AD-1625192 | 44 | 12 | 98 | 18 | 95 | 18 |
| AD-1631033 | 49 | 4 | 89 | 6 | 98 | 8 |
| AD-1625195 | 49 | 6 | 105 | 21 | 111 | 10 |
| AD-1625209 | 40 | 3 | 78 | 10 | 88 | 8 |
| AD-1625230 | 33 | 5 | 76 | 8 | 81 | 7 |
| AD-1631034 | 43 | 5 | 67 | 7 | 76 | 8 |
| AD-1625282 | 40 | 5 | 125 | 18 | 92 | 18 |
| AD-1625389 | 29 | 5 | 95 | 30 | 103 | 14 |
| AD-1631035 | 42 | 4 | 102 | 19 | 112 | 12 |
| AD-1625485 | 31 | 5 | 61 | 6 | 75 | 2 |
| AD-1631036 | 41 | 5 | 117 | 12 | 119 | 19 |
| AD-1625499 | 30 | 3 | 103 | 10 | 103 | 20 |
| AD-1631037 | 35 | 4 | 116 | 14 | 106 | 7 |
| AD-1625501 | 51 | 8 | 93 | 10 | 104 | 9 |
| AD-1625610 | 40 | 4 | 76 | 7 | 79 | 12 |
| AD-1631038 | 58 | 10 | 108 | 20 | 92 | 11 |
| AD-1631039 | 44 | 3 | 106 | 16 | 100 | 9 |
| AD-1625786 | 38 | 5 | 84 | 9 | 84 | 13 |
| AD-1631040 | 62 | 7 | 91 | 8 | 93 | 16 |
| AD-1631041 | 65 | 11 | 111 | 13 | 113 | 9 |
| AD-1625910 | 58 | 4 | 93 | 2 | 100 | 12 |
| AD-1631042 | 73 | 7 | 97 | 8 | 105 | 6 |
| AD-1631043 | 83 | 7 | 95 | 8 | 99 | 13 |
| AD-1625928 | 51 | 9 | 94 | 6 | 102 | 5 |
| AD-1631044 | 43 | 7 | 93 | 7 | 89 | 4 |
| AD-1631045 | 46 | 6 | 106 | 13 | 94 | 10 |
| AD-1631046 | 44 | 3 | 85 | 3 | 88 | 11 |
| AD-1625975 | 29 | 2 | 90 | 16 | 99 | 9 |
| AD-1631047 | 52 | 9 | 97 | 2 | 114 | 9 |
| AD-1631048 | 45 | 5 | 116 | 7 | 97 | 9 |
| AD-1631049 | 37 | 2 | 100 | 6 | 99 | 13 |
| AD-1626183 | 28 | 4 | 67 | 6 | 85 | 7 |
| AD-1626184 | 25 | 6 | 119 | 17 | 102 | 19 |
| AD-1631050 | 31 | 5 | 86 | 8 | 98 | 7 |
| AD-1626265 | 48 | 7 | 99 | 13 | 126 | 19 |
| AD-1631051 | 50 | 7 | 100 | 9 | 116 | 10 |
| AD-1626266 | 24 | 4 | 63 | 12 | 87 | 10 |
| AD-1626268 | 61 | 13 | 119 | 19 | 137 | 20 |
| AD-1631052 | 61 | 10 | 124 | 11 | 105 | 11 |
| AD-1631053 | 37 | 5 | 73 | 0 | 93 | 16 |
| AD-1626270 | 39 | 8 | 92 | 10 | 84 | 10 |
| AD-1631054 | 40 | 12 | 72 | 3 | 77 | 9 |
| AD-1626273 | 41 | 5 | 110 | 27 | 96 | 7 |
| AD-1626280 | 42 | 4 | 113 | 5 | 93 | 10 |
| AD-1631055 | 55 | 5 | 99 | 4 | 88 | 8 |
| AD-1631056 | 89 | 17 | 85 | 10 | 93 | 10 |
| AD-1626349 | 38 | 7 | 80 | 5 | 85 | 2 |
| AD-1626353 | 26 | 2 | 69 | 7 | 96 | 27 |
| AD-1631057 | 40 | 5 | 90 | 10 | 100 | 3 |
| AD-1626375 | 34 | 5 | 83 | 6 | 92 | 4 |
| AD-1626382 | 33 | 3 | 75 | 10 | 88 | 6 |
| AD-1631058 | 39 | 2 | 86 | 4 | 85 | 9 |
| AD-1631059 | 101 | 12 | 89 | 7 | 96 | 2 |
| AD-1626428 | 74 | 7 | 92 | 6 | 116 | 25 |
| AD-1631060 | 91 | 2 | 93 | 7 | 106 | 8 |
| AD-1631061 | 93 | 14 | 99 | 10 | 103 | 4 |
| AD-1631062 | 41 | 3 | 87 | 4 | 80 | 8 |
| AD-1626524 | 54 | 7 | 140 | 24 | 103 | 12 |
| AD-1626636 | 44 | 4 | 75 | 6 | 96 | 7 |
| AD-1631063 | 62 | 3 | 91 | 3 | 108 | 12 |
| AD-1631064 | 66 | 9 | 107 | 7 | 108 | 12 |
| AD-1626921 | 51 | 5 | 93 | 6 | 110 | 7 |
| AD-1631065 | 37 | 6 | 75 | 5 | 93 | 11 |
| AD-1631066 | 64 | 6 | 99 | 4 | 98 | 10 |
| AD-1626925 | 40 | 5 | 94 | 6 | 100 | 9 |
| AD-1631067 | 70 | 6 | 104 | 6 | 107 | 8 |
| AD-1626927 | 90 | 13 | 112 | 10 | 108 | 7 |
| AD-1626936 | 38 | 3 | 106 | 4 | 101 | 5 |
| AD-1626946 | 54 | 10 | 93 | 6 | 81 | 8 |
| AD-1631068 | 89 | 12 | 100 | 6 | 107 | 11 |
| AD-1631069 | 54 | 3 | 93 | 4 | 103 | 15 |
| AD-1627077 | 49 | 6 | 95 | 4 | 94 | 5 |
| AD-1627110 | 49 | 5 | 105 | 9 | 87 | 10 |
| AD-1631070 | 38 | 10 | 76 | 3 | 100 | 10 |
| AD-1631071 | 27 | 3 | 81 | 5 | 94 | 17 |
| AD-1631072 | 85 | 6 | 105 | 17 | 107 | 10 |
| AD-1627308 | 26 | 2 | 70 | 5 | 79 | 13 |
| AD-1631073 | 72 | 5 | 91 | 9 | 98 | 6 |
| AD-1627390 | 31 | 4 | 77 | 3 | 97 | 10 |
| AD-1631074 | 38 | 3 | 95 | 9 | 111 | 18 |
| AD-1627410 | 47 | 5 | 86 | 8 | 116 | 13 |
| AD-1631075 | 40 | 3 | 91 | 8 | 88 | 14 |
| AD-1627411 | 72 | 2 | 88 | 9 | 99 | 19 |
| AD-1631076 | 39 | 3 | 88 | 7 | 89 | 11 |
| AD-1627412 | 77 | 6 | 87 | 5 | 94 | 12 |
| AD-1631077 | 24 | 1 | 80 | 3 | 106 | 9 |
| AD-1627511 | 30 | 3 | 97 | 8 | 110 | 4 |
| AD-1631078 | 35 | 1 | 85 | 5 | 109 | 9 |
| AD-1631079 | 44 | 4 | 108 | 14 | 103 | 9 |
| AD-1631080 | 25 | 2 | 73 | 6 | 79 | 6 |
| AD-1627601 | 29 | 4 | 108 | 9 | 89 | 7 |
| AD-1627625 | 33 | 5 | 79 | 6 | 86 | 5 |
| AD-1631081 | 44 | 6 | 74 | 8 | 91 | 6 |
| AD-1627631 | 44 | 9 | 105 | 18 | 108 | 8 |
| AD-1627632 | 46 | 6 | 112 | 7 | 110 | 8 |
| AD-1627672 | 37 | 3 | 82 | 6 | 85 | 12 |
| AD-1631082 | 40 | 4 | 87 | 4 | 90 | 4 |
| AD-1627717 | 38 | 1 | 87 | 5 | 104 | 12 |
| AD-1631083 | 63 | 6 | 103 | 6 | 109 | 3 |
| AD-1631084 | 67 | 3 | 109 | 6 | 94 | 7 |
| AD-1631085 | 38 | 5 | 97 | 9 | 96 | 8 |
| AD-1631086 | 41 | 3 | 97 | 7 | 93 | 12 |
| AD-1627766 | 38 | 3 | 89 | 8 | 100 | 15 |
| AD-1631087 | 54 | 8 | 99 | 13 | 92 | 5 |
| AD-1627767 | 26 | 3 | 92 | 11 | 74 | 11 |
| AD-1631089 | 38 | 5 | 92 | 12 | 94 | 5 |
| AD-1627769 | 42 | 5 | 82 | 5 | 104 | 10 |
| AD-1627772 | 32 | 4 | 96 | 11 | 87 | 6 |
| AD-1631090 | 35 | 2 | 94 | 4 | 87 | 7 |
| AD-1627820 | 37 | 4 | 77 | 9 | 77 | 4 |
| AD-1627838 | 32 | 3 | 87 | 8 | 86 | 6 |
| AD-1627852 | 61 | 4 | 94 | 7 | 114 | 4 |
| AD-1627856 | 46 | 5 | 88 | 7 | 95 | 5 |
| AD-1631091 | 88 | 5 | 86 | 11 | 110 | 11 |
| AD-1627866 | 35 | 6 | 88 | 8 | 87 | 4 |
| AD-1627870 | 40 | 3 | 105 | 10 | 90 | 7 |
| AD-1631092 | 84 | 6 | 90 | 10 | 100 | 12 |
| AD-1631093 | 40 | 5 | 99 | 10 | 109 | 10 |
| AD-1627896 | 41 | 7 | 77 | 5 | 104 | 6 |
| AD-1631094 | 32 | 2 | 106 | 11 | 79 | 13 |
| AD-1631095 | 58 | 5 | 111 | 10 | 105 | 17 |
| AD-1631096 | 41 | 8 | 90 | 6 | 102 | 9 |
| AD-1627952 | 44 | 4 | 90 | 9 | 105 | 10 |
| AD-1631097 | 61 | 6 | 100 | 6 | 112 | 8 |
| AD-1631098 | 84 | 5 | 81 | 10 | 77 | 4 |
| AD-1631099 | 54 | 8 | 100 | 9 | 105 | 5 |
| AD-1628008 | 71 | 26 | 90 | 7 | 85 | 4 |
| AD-1631100 | 38 | 3 | 96 | 8 | 104 | 9 |
| AD-1631101 | 67 | 2 | 102 | 11 | 115 | 10 |
| AD-1631102 | 54 | 5 | 95 | 11 | 93 | 4 |
| AD-1628014 | 28 | 2 | 70 | 4 | 86 | 3 |
| AD-1631103 | 37 | 3 | 86 | 3 | 97 | 10 |
| AD-1631104 | 80 | 4 | 101 | 10 | 98 | 8 |
| AD-1631105 | 42 | 7 | 97 | 4 | 113 | 10 |
| AD-1628027 | 55 | 9 | 89 | 5 | 103 | 9 |
| AD-1631106 | 55 | 9 | 95 | 4 | 100 | 9 |
| AD-1631107 | 48 | 5 | 86 | 10 | 99 | 12 |
| AD-1628042 | 31 | 2 | 85 | 2 | 91 | 7 |
| AD-1631108 | 43 | 2 | 87 | 7 | 91 | 6 |
| AD-1628043 | 46 | 11 | 82 | 9 | 93 | 4 |
| AD-1628044 | 27 | 1 | 64 | 6 | 76 | 6 |
| AD-1628050 | 28 | 3 | 86 | 7 | 98 | 6 |
| AD-1631109 | 29 | 2 | 82 | 3 | 99 | 3 |
| AD-1631110 | 40 | 5 | 94 | 11 | 91 | 8 |
| AD-1628052 | 32 | 4 | 97 | 11 | 102 | 8 |
| AD-1631111 | 36 | 4 | 95 | 6 | 116 | 17 |
| AD-1631112 | 88 | 7 | 84 | 1 | 85 | 6 |
| AD-1628070 | 28 | 4 | 77 | 4 | 73 | 7 |
| AD-1628073 | 25 | 3 | 72 | 7 | 89 | 14 |
| AD-1631113 | 43 | 7 | 69 | 8 | 82 | 4 |
| AD-1631114 | 70 | 20 | 87 | 3 | 104 | 8 |
| AD-1631115 | 45 | 6 | 77 | 3 | 84 | 11 |
| AD-1631116 | 54 | 9 | 79 | 8 | 85 | 9 |
| AD-1631117 | 40 | 1 | 100 | 12 | 108 | 11 |
| AD-1631118 | 33 | 1 | 79 | 2 | 79 | 3 |
| AD-1628118 | 49 | 3 | 100 | 8 | 100 | 5 |
| AD-1631119 | 63 | 7 | 92 | 10 | 98 | 8 |
| AD-1631120 | 57 | 10 | 100 | 5 | 96 | 6 |
| AD-1628119 | 62 | 1 | 103 | 9 | 106 | 6 |
| AD-1631121 | 37 | 8 | 80 | 7 | 104 | 16 |
| AD-1628133 | 38 | 8 | 98 | 4 | 106 | 7 |
| AD-1631122 | 49 | 4 | 97 | 15 | 106 | 16 |
| AD-1628253 | 52 | 11 | 90 | 5 | 99 | 13 |
| AD-1631123 | 58 | 8 | 96 | 4 | 101 | 5 |
| AD-1631124 | 47 | 3 | 99 | 11 | 103 | 7 |
| AD-1628254 | 52 | 10 | 98 | 11 | 106 | 11 |
| AD-1631125 | 62 | 5 | 102 | 15 | 102 | 6 |
| AD-1631126 | 97 | 13 | 92 | 4 | 97 | 12 |
| AD-1628273 | 81 | 3 | 109 | 3 | 83 | 13 |
| AD-1631127 | 81 | 13 | 91 | 8 | 91 | 10 |
| AD-1631128 | 41 | 6 | 82 | 6 | 81 | 9 |
| AD-1628318 | 54 | 6 | 82 | 1 | 82 | 2 |
| AD-1631129 | 40 | 3 | 128 | 8 | 112 | 10 |
| AD-1631130 | 53 | 6 | 103 | 5 | 110 | 8 |
| AD-1628381 | 38 | 3 | 71 | 3 | 81 | 2 |
| AD-1631131 | 109 | 12 | 78 | 4 | 87 | 4 |
| AD-1631132 | 25 | 8 | 63 | 3 | 75 | 8 |
| AD-1628382 | 25 | 4 | 63 | 4 | 81 | 9 |
| AD-1628383 | 29 | 1 | 78 | 12 | 83 | 6 |
| AD-1631133 | 101 | 10 | 94 | 8 | 96 | 12 |
| AD-1628385 | 37 | 5 | 79 | 5 | 95 | 9 |
| AD-1628396 | 26 | 1 | 86 | 6 | 83 | 8 |
| AD-1631134 | 32 | 6 | 85 | 4 | 88 | 15 |
| AD-1631135 | 36 | 1 | 81 | 10 | 93 | 5 |
| AD-1631136 | 30 | 4 | 78 | 5 | 90 | 4 |
| AD-1631137 | 57 | 13 | 94 | 11 | 115 | 26 |
| AD-1628412 | 36 | 4 | 119 | 26 | 94 | 3 |
| AD-1631138 | 44 | 6 | 103 | 4 | 83 | 3 |
| AD-1628434 | 35 | 5 | 91 | 5 | 118 | 16 |
| AD-1631139 | 59 | 5 | 102 | 10 | 96 | 7 |
| AD-1631140 | 44 | 5 | 122 | 0 | 106 | 5 |
| AD-1628441 | 56 | 6 | 108 | 10 | 116 | 11 |
| AD-1628442 | 48 | 4 | 78 | 1 | 88 | 5 |
| AD-1628443 | 63 | 1 | 93 | 10 | 90 | 12 |
| AD-1631141 | 73 | 6 | 89 | 3 | 92 | 5 |
| AD-1631142 | 51 | 7 | 91 | 9 | 83 | 8 |
| AD-1628444 | 55 | 10 | 94 | 8 | 84 | 7 |
| AD-1631143 | 65 | 6 | 100 | 5 | 121 | 17 |
| AD-1631144 | 74 | 8 | 98 | 6 | 98 | 4 |
| AD-1631145 | 82 | 1 | 84 | 6 | 80 | 2 |
| AD-1631146 | 57 | 0 | 134 | 7 | 116 | 19 |
| AD-1628467 | 33 | 4 | 87 | 4 | 81 | 2 |
| AD-1631147 | 36 | 2 | 86 | 4 | 84 | 7 |
| AD-1628570 | 26 | 3 | 80 | 8 | 90 | 8 |
| AD-1628590 | 45 | 4 | 85 | 6 | 93 | 10 |
| AD-1631148 | 35 | 4 | 84 | 10 | 74 | 7 |
| AD-1631149 | 20 | 2 | 66 | 5 | 78 | 13 |
| AD-1628668 | 49 | 9 | 111 | 23 | 110 | 14 |
| AD-1631150 | 37 | 4 | 84 | 6 | 77 | 4 |
| AD-1628754 | 28 | 4 | 71 | 12 | 82 | 1 |
| AD-1628759 | 25 | 3 | 84 | 6 | 103 | 6 |
| AD-1631151 | 52 | 8 | 98 | 8 | 92 | 11 |
| AD-1631152 | 23 | 2 | 69 | 6 | 73 | 8 |
| AD-1631153 | 28 | 2 | 99 | 8 | 87 | 6 |
| AD-1631154 | 39 | 3 | 102 | 12 | 133 | 5 |
| AD-1628764 | 40 | 2 | 107 | 7 | 99 | 9 |
| AD-1628794 | 35 | 9 | 67 | 5 | 90 | 12 |
| AD-1628883 | 40 | 4 | 94 | 9 | 98 | 9 |
| AD-1631155 | 40 | 4 | 71 | 1 | 97 | 0 |
| AD-1631156 | 27 | 1 | 93 | 7 | 82 | 5 |
| AD-1631157 | 30 | 6 | 61 | 1 | 86 | 1 |
| AD-1631158 | 36 | 2 | 97 | 9 | 111 | 4 |
| AD-1628951 | 38 | 7 | 87 | 4 | 97 | 6 |
| AD-1631159 | 78 | 9 | 103 | 13 | 100 | 11 |
| AD-1628961 | 78 | 5 | 100 | 7 | 111 | 15 |
| AD-1631160 | 81 | 0 | 102 | 5 | 129 | 21 |
| AD-1631161 | 27 | 4 | 70 | 1 | 81 | 7 |
| AD-1628963 | 33 | 7 | 89 | 7 | 82 | 6 |
| AD-1631162 | 34 | 4 | 97 | 11 | 90 | 7 |
| AD-1631163 | 43 | 6 | 94 | 9 | 82 | 10 |
| AD-1629007 | 48 | 4 | 95 | 5 | 78 | 9 |
| AD-1631164 | 75 | 10 | 97 | 6 | 97 | 6 |
| AD-1631165 | 67 | 3 | 99 | 8 | 92 | 10 |
| AD-1629012 | 76 | 17 | 93 | 6 | 108 | 10 |
| AD-1631166 | 49 | 2 | 119 | 13 | 99 | 0 |
| AD-1631167 | 43 | 5 | 100 | 5 | 112 | 9 |
| AD-1629024 | 39 | 4 | 92 | 6 | 94 | 8 |
| AD-1631168 | 80 | 12 | 99 | 10 | 94 | 11 |
| AD-1629025 | 43 | 6 | 85 | 6 | 88 | 9 |
| AD-1629026 | 33 | 1 | 106 | 6 | 93 | 12 |
| AD-1631169 | 60 | 4 | 124 | 16 | 102 | 7 |
| AD-1631170 | 118 | 4 | 99 | 5 | 89 | 7 |
| AD-1631171 | 37 | 8 | 116 | 13 | 105 | 10 |
| AD-1629028 | 60 | 17 | 108 | 16 | 117 | 21 |
| AD-1631172 | 40 | 4 | 105 | 11 | 99 | 8 |
| AD-1629031 | 48 | 3 | 90 | 11 | 107 | 8 |
| AD-1631173 | 72 | 19 | 94 | 10 | 94 | 0 |
| AD-1629032 | 44 | 4 | 111 | 10 | 100 | 15 |
| AD-1631174 | 69 | 16 | 90 | 9 | 106 | 10 |
| AD-1631175 | 62 | 6 | 88 | 7 | 88 | 5 |
| AD-1629033 | 62 | 6 | 97 | 6 | 110 | 12 |
| AD-1631176 | 38 | 4 | 94 | 4 | 114 | 14 |
| AD-1631177 | 54 | 11 | 87 | 7 | 94 | 10 |
| AD-1631178 | 39 | 2 | 108 | 7 | 122 | 18 |
| AD-1629039 | 41 | 6 | 125 | 12 | 105 | 9 |
| AD-1631179 | 43 | 3 | 93 | 7 | 103 | 12 |
| AD-1631180 | 27 | 3 | 96 | 7 | 101 | 5 |
| AD-1631181 | 101 | 14 | 112 | 18 | 119 | 14 |
| AD-1631182 | 18 | 2 | 62 | 9 | 69 | 3 |
| AD-1629092 | 26 | 5 | 65 | 5 | 72 | 13 |
| AD-1631183 | 55 | 9 | 107 | 12 | 109 | 4 |
| AD-1631184 | 47 | 4 | 83 | 6 | 101 | 3 |
| AD-1631185 | 103 | 7 | 112 | 15 | 124 | 12 |
| AD-1631186 | 42 | 6 | 93 | 8 | 97 | 13 |
| AD-1631187 | 40 | 14 | 78 | 7 | 77 | 0 |
| AD-1631188 | 33 | 7 | 106 | 15 | 94 | 16 |
| AD-1629200 | 34 | 2 | 93 | 10 | 122 | 20 |
| AD-1631189 | 60 | 12 | 123 | 14 | 93 | 3 |
| AD-1629214 | 30 | 1 | 96 | 5 | 106 | 4 |
| AD-1629216 | 37 | 2 | 66 | 3 | 90 | 10 |
| AD-1631190 | 30 | 12 | 86 | 5 | 109 | 5 |
| AD-1629223 | 23 | 4 | 66 | 7 | 83 | 5 |
| AD-1629224 | 34 | 3 | 98 | 12 | 111 | 9 |
| AD-1631191 | 32 | 7 | 89 | 5 | 93 | 10 |
| AD-1631192 | 28 | 7 | 91 | 3 | 104 | 10 |
| AD-1631193 | 24 | 1 | 70 | 9 | 89 | 8 |
| AD-1631194 | 33 | 1 | 84 | 5 | 96 | 4 |
| AD-1629263 | 35 | 3 | 84 | 11 | 89 | 7 |
| AD-1629280 | 31 | 4 | 88 | 8 | 95 | 8 |
| AD-1631195 | 86 | 5 | 106 | 5 | 102 | 6 |
| AD-1631196 | 23 | 1 | 90 | 6 | 89 | 2 |
| AD-1629292 | 36 | 7 | 93 | 8 | 100 | 15 |
| AD-1631197 | 38 | 4 | 103 | 7 | 103 | 11 |
| AD-1629298 | 53 | 5 | 96 | 1 | 101 | 6 |
| AD-1631198 | 88 | 8 | 108 | 13 | 113 | 6 |
| AD-1629304 | 28 | 3 | 81 | 5 | 96 | 5 |
| AD-1631199 | 35 | 4 | 88 | 3 | 97 | 5 |
| AD-1631200 | 37 | 5 | 96 | 15 | 100 | 9 |
| AD-1631201 | 36 | 5 | 91 | 20 | 105 | 10 |
| AD-1629419 | 53 | 6 | 92 | 5 | 105 | 7 |
| AD-1631202 | 68 | 11 | 102 | 9 | 102 | 2 |
| AD-1631203 | 61 | 9 | 111 | 9 | 111 | 8 |
| AD-1631204 | 41 | 7 | 83 | 2 | 95 | 13 |
| AD-1629524 | 20 | 3 | 77 | 9 | 100 | 6 |
| AD-1631205 | 26 | 4 | 82 | 9 | 97 | 3 |
| AD-1631206 | 30 | 5 | 88 | 9 | 84 | 4 |
| AD-1629573 | 34 | 6 | 89 | 8 | 91 | 6 |
| AD-1631207 | 43 | 2 | 89 | 4 | 100 | 7 |
| AD-1631208 | 39 | 7 | 102 | 4 | 118 | 14 |
| AD-1629580 | 46 | 5 | 97 | 8 | 113 | 7 |
| AD-1629581 | 54 | 11 | 111 | 4 | 104 | 5 |
| AD-1631209 | 88 | 7 | 129 | 11 | 107 | 4 |
| AD-1629597 | 70 | 3 | 103 | 10 | 114 | 14 |
| AD-1631210 | 23 | 2 | 78 | 6 | 93 | 6 |
| AD-1629619 | 26 | 2 | 85 | 8 | 102 | 10 |
| AD-1629620 | 25 | 3 | 75 | 3 | 84 | 3 |
| AD-1629621 | 24 | 5 | 75 | 5 | 81 | 4 |
| AD-1629665 | 54 | 8 | 104 | 5 | 96 | 7 |
| AD-1631211 | 75 | 12 | 111 | 16 | 113 | 11 |
| AD-1631212 | 42 | 8 | 84 | 8 | 101 | 7 |
| AD-1629707 | 57 | 7 | 99 | 4 | 107 | 10 |
| AD-1629710 | 56 | 9 | 94 | 10 | 95 | 7 |
| AD-1631213 | 82 | 7 | 99 | 12 | 94 | 8 |
| AD-1629711 | 72 | 2 | 96 | 8 | 95 | 12 |
| AD-1631214 | 85 | 8 | 89 | 6 | 106 | 9 |
| AD-1629763 | 22 | 2 | 52 | 7 | 80 | 9 |
| AD-1631215 | 24 | 2 | 63 | 7 | 72 | 5 |
| AD-1631216 | 37 | 3 | 84 | 7 | 99 | 11 |
| AD-1629799 | 26 | 2 | 79 | 5 | 91 | 8 |
| AD-1631217 | 96 | 16 | 82 | 1 | 114 | 11 |
| AD-1629807 | 34 | 2 | 84 | 4 | 93 | 12 |
| AD-1629808 | 28 | 7 | 73 | 7 | 82 | 12 |
| AD-1629809 | 22 | 3 | 57 | 3 | 70 | 4 |
| AD-1629838 | 26 | 4 | 84 | 10 | 87 | 18 |
| AD-1629876 | 33 | 4 | 110 | 20 | 103 | 1 |
| AD-1631218 | 50 | 4 | 85 | 9 | 92 | 7 |
| AD-1629878 | 41 | 7 | 78 | 6 | 89 | 9 |
| AD-1631219 | 39 | 7 | 89 | 6 | 99 | 6 |
| AD-1631220 | 33 | 2 | 82 | 9 | 91 | 6 |
| AD-1630135 | 28 | 3 | 81 | 10 | 88 | 12 |
| AD-1631221 | 29 | 3 | 96 | 15 | 84 | 5 |
| AD-1630136 | 35 | 8 | 69 | 4 | 72 | 7 |

TABLE 9
IC70 of LRRK2 Parent dsRNA Agents and Dose Screen
of C16-Conjugated Corresponding dsRNA Agents

| | Parent | | C16 Duplex (10 nM) |
|---|---|---|---|
| | in vitro | | Avg % LRRK2 |
| Parent Duplex ID | IC70 (nM) | C16 Duplex ID | mRNA Remaining |
| AD-1631182 | 3.31 | AD-1807334 | 37% |
| AD-1629763 | 4.27 | AD-1807335 | 43% |
| AD-1629809 | 4.78 | AD-1807336 | 33% |
| AD-1629524 | 5.26 | AD-1807337 | 34% |
| AD-1629223 | 6.31 | AD-1807338 | 40% |
| AD-1626266 | 6.60 | AD-1807339 | 36% |
| AD-1631152 | 6.93 | AD-1807340 | 35% |
| AD-1628382 | 7.60 | AD-1807341 | 38% |
| AD-1631132 | 7.86 | AD-1807342 | 31% |
| AD-1631077 | 8.06 | AD-1807343 | 31% |
| AD-1629621 | 8.40 | AD-1807344 | 43% |
| AD-1628073 | 8.61 | AD-1807345 | 36% |
| AD-1626353 | 8.82 | AD-1807346 | 41% |
| AD-1629620 | 9.34 | AD-1807347 | 42% |
| AD-1631080 | 9.35 | AD-1807348 | 35% |
| AD-1628759 | 9.55 | AD-1807349 | 38% |
| AD-1629092 | 9.67 | AD-1807350 | 42% |
| AD-1627308 | 10.08 | AD-1807351 | 34% |
| AD-1628044 | 10.45 | AD-1807352 | 35% |
| AD-1629799 | 10.71 | AD-1807353 | 45% |
| AD-1631205 | 10.74 | AD-1807354 | 40% |
| AD-1629619 | 10.84 | AD-1807355 | 50% |
| AD-1628570 | 10.95 | AD-1807356 | 32% |
| AD-1631161 | 11.30 | AD-1807357 | 48% |
| AD-1626183 | 11.65 | AD-1807358 | 35% |
| AD-1629838 | 11.94 | AD-1807359 | 35% |
| AD-1628014 | 12.25 | AD-1807360 | 41% |
| AD-1628396 | 12.80 | AD-1807361 | 50% |
| AD-1628754 | 13.05 | AD-1807362 | 33% |
| AD-1629304 | 13.47 | AD-1807363 | 41% |
| AD-1629808 | 13.58 | AD-1807364 | 34% |
| AD-1626184 | 14.03 | AD-1807365 | 32% |
| AD-1631180 | 14.06 | AD-1807366 | 39% |
| AD-1628050 | 14.25 | AD-1807367 | 36% |
| AD-1631192 | 14.47 | AD-1807368 | 40% |
| AD-1630135 | 14.61 | AD-1807369 | 37% |
| AD-1631109 | 14.99 | AD-1807370 | 41% |
| AD-1627767 | 15.79 | AD-1807371 | 39% |
| AD-1631190 | 16.25 | AD-1807372 | 34% |
| AD-1625975 | 16.84 | AD-1807373 | 21% |
| AD-1628070 | 16.84 | AD-1807374 | 36% |
| AD-1631149 | 4.53 | AD-1807375 | 42% |
| AD-1631215 | 7.02 | AD-1807376 | 41% |
| AD-1631210 | 7.40 | AD-1807377 | 41% |
| AD-1631193 | 7.42 | AD-1807378 | 33% |

TABLE 10
Parent dsRNA Agents and Dose Screen of
Unconjugated Corresponding dsRNA Agents

| | | Unconjugated Duplex (10 nM) |
|---|---|---|
| | Unconjugated | Avg % LRRK2 mRNA |
| Parent Duplex ID | Duplex ID | Remaining |
| AD-1631182 | AD-1807379 | 33% |
| AD-1629763 | AD-1807380 | 34% |
| AD-1629809 | AD-1807381 | 39% |
| AD-1629524 | AD-1807382 | 34% |
| AD-1629223 | AD-1807383 | 37% |
| AD-1626266 | AD-1807384 | 27% |
| AD-1631152 | AD-1807385 | 37% |
| AD-1628382 | AD-1807386 | 34% |
| AD-1631132 | AD-1807387 | 31% |
| AD-1631077 | AD-1807388 | 35% |
| AD-1629621 | AD-1807389 | 40% |
| AD-1628073 | AD-1807390 | 32% |
| AD-1626353 | AD-1807391 | 26% |
| AD-1629620 | AD-1807392 | 41% |
| AD-1631080 | AD-1807393 | 32% |
| AD-1628759 | AD-1807394 | 37% |
| AD-1629092 | AD-1807395 | 29% |
| AD-1627308 | AD-1807396 | 35% |
| AD-1628044 | AD-1807397 | 47% |
| AD-1629799 | AD-1807398 | 40% |
| AD-1631205 | AD-1807399 | 33% |
| AD-1629619 | AD-1807400 | 41% |
| AD-1628570 | AD-1807401 | 37% |
| AD-1631161 | AD-1807402 | 39% |
| AD-1626183 | AD-1807403 | 33% |
| AD-1629838 | AD-1807404 | 41% |
| AD-1628014 | AD-1807405 | 36% |
| AD-1628396 | AD-1807406 | 34% |
| AD-1628754 | AD-1807407 | 35% |
| AD-1629304 | AD-1807408 | 47% |
| AD-1629808 | AD-1807409 | 34% |
| AD-1626184 | AD-1807410 | 20% |
| AD-1631180 | AD-1807411 | 37% |
| AD-1628050 | AD-1807412 | 38% |
| AD-1631192 | AD-1807413 | 33% |
| AD-1630135 | AD-1807414 | 41% |
| AD-1631109 | AD-1807415 | 40% |
| AD-1627767 | AD-1807416 | 44% |
| AD-1631190 | AD-1807417 | 35% |
| AD-1625975 | AD-1807418 | 21% |
| AD-1628070 | AD-1807419 | 39% |
| AD-1631149 | AD-1807420 | 38% |
| AD-1631215 | AD-1807421 | 37% |
| AD-1631210 | AD-1807422 | 39% |
| AD-1631193 | AD-1807423 | 39% |
| AD-1631182 | AD-1807379 | 33% |
| AD-1629763 | AD-1807380 | 34% |
| AD-1629809 | AD-1807381 | 39% |
| AD-1629524 | AD-1807382 | 34% |
| AD-1629223 | AD-1807383 | 37% |
| AD-1626266 | AD-1807384 | 27% |
| AD-1631152 | AD-1807385 | 37% |
| AD-1628382 | AD-1807386 | 34% |
| AD-1631132 | AD-1807387 | 31% |
| AD-1631077 | AD-1807388 | 35% |
| AD-1629621 | AD-1807389 | 40% |
| AD-1628073 | AD-1807390 | 32% |
| AD-1626353 | AD-1807391 | 26% |
| AD-1629620 | AD-1807392 | 41% |
| AD-1631080 | AD-1807393 | 32% |
| AD-1628759 | AD-1807394 | 37% |
| AD-1629092 | AD-1807395 | 29% |
| AD-1627308 | AD-1807396 | 35% |
| AD-1628044 | AD-1807397 | 47% |
| AD-1629799 | AD-1807398 | 40% |
| AD-1631205 | AD-1807399 | 33% |
| AD-1629619 | AD-1807400 | 41% |
| AD-1628570 | AD-1807401 | 37% |
| AD-1631161 | AD-1807402 | 39% |
| AD-1626183 | AD-1807403 | 33% |
| AD-1629838 | AD-1807404 | 41% |
| AD-1628014 | AD-1807405 | 36% |
| AD-1628396 | AD-1807406 | 34% |
| AD-1628754 | AD-1807407 | 35% |
| AD-1629304 | AD-1807408 | 47% |
| AD-1629808 | AD-1807409 | 34% |
| AD-1626184 | AD-1807410 | 20% |
| AD-1631180 | AD-1807411 | 37% |
| AD-1628050 | AD-1807412 | 38% |
| AD-1631192 | AD-1807413 | 33% |
| AD-1630135 | AD-1807414 | 41% |
| AD-1631109 | AD-1807415 | 40% |
| AD-1627767 | AD-1807416 | 44% |
| AD-1631190 | AD-1807417 | 35% |
| AD-1625975 | AD-1807418 | 21% |
| AD-1628070 | AD-1807419 | 39% |
| AD-1631149 | AD-1807420 | 38% |
| AD-1631215 | AD-1807421 | 37% |
| AD-1631210 | AD-1807422 | 39% |
| AD-1631193 | AD-1807423 | 39% |

[0730] Based on the in vitro data provided in Tables 8-10, LRRK2 mRNA target sequences which, upon binding of a dsRNA agent, were associated with decrease in LRRK2 mRNA to a remaining message level of <40% and <30% o, were identified in Tables 11 and 12, respectively.

TABLE 11
LRRK2 mRNA target sequences having ≤40% message remaining as measured in Example 2

| Target | Target | | SEQ ID |
|---|---|---|---|
| Start | End | mRNA Target Sequence (NM_198578.4) | NO: |
| 3620 | 3652 | UGAAUUUUCUUGCUGCUAUGCCUUUCUUGCCUC | 2260 |
| 3794 | 3849 | UGAACUUAAGGGAACUCUUAUUUAGCCAUAAUCAGAUCA | 2261 |
| | | GCAUCUUGGACUUGAGU | |
| 5194 | 5222 | AACUCUGAAAUUAUCAUCCGACUAUAUGA | 2262 |
| 5366 | 5393 | CUGAAGCUUAUUGUCUGGUAGGAUCUGA | 2263 |
| 5423 | 5463 | UAAAAAUUACAGUUCCUUCUUGUAGAAAAGGCUGUAUUC | 2264 |
| | | UU | |
| 5674 | 5704 | AGGCUCACCAUUCCAAUAUCUCAGAUUGCCC | 2265 |
| 5720 | 5745 | CUGACCUGCCUAGAAAUAUUAUGUUG | 2266 |
| 6090 | 6114 | CCACUCAGCCAUGAUUAUAUACCGA | 2267 |
| 6125 | 6156 | CCCACAAUGUGCUGCUUUUCACACUGUAUCCC | 2268 |
| 6518 | 6561 | UCUUUGACAUUUUGAAUUCAGCUGAAUUAGUCUGUCUGA | 2269 |
| | | CGAGA | |
| 6721 | 6750 | GAUAGUAGAAUAUUGUGCUUAGCCUUGGUG | 2270 |
| 6740 | 6763 | UAGCCUUGGUGCAUCUUCCUGUUG | 2271 |
| 7016 | 7061 | GAAAUGUCAGUACUCCAUUGAUGUGUUUGAGUGAAUCCA | 2272 |
| | | CAAAUUC | |
| 7083 | 7123 | GGGAGGAUGUGGCACAAAGAUUUUCUCCUUUUCUAAUGA | 2273 |
| | | UU | |
| 7112 | 7136 | UUUCUAAUGAUUUCACCAUUCAGAA | 2274 |
| 7125 | 7169 | CACCAUUCAGAAACUCAUUGAGACAAGAACAAGCCAACUG | 2275 |
| | | UUUUC | |
| 7346 | 7373 | CAAAACACAAAAUGUCUUAUUCUGGGAG | 2276 |
| 7441 | 7465 | CUCCUGGAUCUUUCAACUCGUCGAC | 2277 |
| 7591 | 7659 | CAGAAAGAGAUACAAUCUUGCUUGACCGUUUGGGACAUC | 2278 |
| | | AAUCUUCCACAUGAAGUGCAAAAUUUAGAA | |
| 8132 | 8155 | UGAAAAUAUUAAGACAGUUUCCCA | 2279 |

TABLE 12
LRRK2 mRNA target sequences having ≤30% message remaining as measured
in Example 2

| Target | Target | | SEQ ID |
|---|---|---|---|
| Start | End | mRNA Target Sequence (NM_198578.4) | NO.: |
| 3627 | 3650 | UCUUGCUGCUAUGCCUUUCUUGCC | 2280 |
| 5194 | 5222 | AACUCUGAAAUUAUCAUCCGACUAUAUGA | 2281 |
| 5674 | 5702 | AGGCUCACCAUUCCAAUAUCUCAGAUUGC | 2282 |
| 5720 | 5745 | CUGACCUGCCUAGAAAUAUUAUGUUG | 2283 |
| 6091 | 6114 | CACUCAGCCAUGAUUAUAUACCGA | 2284 |
| 6529 | 6559 | UUGAAUUCAGCUGAAUUAGUCUGUCUGACGA | 2285 |
| 7034 | 7061 | UGAUGUGUUUGAGUGAAUCCACAAAUUC | 2286 |
| 7441 | 7465 | CUCCUGGAUCUUUCAACUCGUCGAC | 2287 |
| 7636 | 7659 | CCACAUGAAGUGCAAAAUUUAGAA | 2288 |

[0731] It is expressly contemplated that nucleotides 3620-3652, 3794-3849, 5194-5222, 5366-5393, 5423-5463, 5674-5704, 5720-5745, 6090-6114, 6125-6156, 6518-6561, 6721-6750, 6740-6763, 7016-7061, 7083-7123, 7112-7136, 7125-7169, 7346-7373, 7441-7465, 7591-7659, 7636-7659, 8132-8155, 3627-3650, 5194-5222, 5674-5702, 5720-5745, 6091-6114, 6529-6559, 7034-7061, 7441-7465, and 7636-7659 of NM_001276.4 comprise hotspot regions, set forth as SEQ ID NOs: 2260-2288, which is targeted by AD-1627308, AD-1631049, AD-1631050, AD-1626349, AD-1626353, AD-1626375, AD-1626382, AD-1631080, AD-1807348, AD-1807393, AD-1631088, AD-1631089, AD-1631090, AD-1631108, AD-1807416, AD-1807371, AD-1627767, AD-1627769, AD-1627772, AD-1631109, AD-1631110, AD-1631111, AD-1627820, AD-1627838, AD-1628042, AD-1628043, AD-1628044, AD-1628050, AD-1628052, AD-1628070, AD-1631108, AD-1631109, AD-1631110, AD-1631111, AD-1807397, AD-1807352, AD-1628073, AD-1807374, AD-1807419, AD-1628381, AD-1628382, AD-1628383, AD-1631131, AD-1631132, AD-1631133, AD-1628396, AD-1807361, AD-1807406, AD-1631150, AD-1631151, AD-1631152, AD-1631153, AD-1631154, AD-1631155, AD-1631156, AD-1631157, AD-1631158, AD-1631160, AD-1631161, AD-1631162, AD-1807357, AD-1807402, AD-1628961, AD-1628963, AD-1629214, AD-1629216, AD-1629223, AD-1629224, AD-1629263, AD-1629280, AD-1631194, AD-1631195, AD-1631196, AD-1631197, AD-1807363, AD-1807408, AD-1629304, AD-1629524, AD-1631205, AD-1631206, AD-1807337, AD-1807354, AD-1807382, AD-1807399, AD-1629619, AD-1629620, AD-1629621, AD-1631210, AD-1807355, AD-1807377, AD-1807400, AD-1807422, AD-1629763, AD-1631215, AD-1631216, AD-1631217, AD-1807335, AD-1807336, AD-1807376, AD-1807380, AD-1807381, AD-1807421, AD-1630135, AD-1630136, AD-1631221, AD-1807369, AD-1807414, AD-1807364, AD-1807409, AD-1629808, and AD-1629809.

### Example 3. In Vivo Evaluation of LRRK2 mRNA Suppression in Mice

[0732] This Example describes methods for the in vivo evaluation of LRRK2 RNAi agents in mice expressing human Lrrk2 RNAs.

### Experimental Methods

[0733] To assess the efficacy of the RNAi agents described herein, these agents are administered to mice that express mouse Lrrk2 or human LRRK2. In some experiments, the RNAi agents (in buffer such as aCSF) or aCSF control is administered to female C57BL/6 mice that are about 6-8 weeks old.

[0734] In other experiments, the RNAi agents (in buffer such as aCSF) or aCSF control was administered in a randomized manner to humanized female C57BL/6J-Tg(LRRK2*G2019S)2AMjff/J mice (“MJFF mice”) that were about 10-16 weeks old. The MJFF mice are hemizygous for the human BAC LRRK2 (G2019S) transgene that expresses a mutant form of LRRK2 (G2019S) associated with autosomal dominant, late-onset Parkinson's disease directed by the human LRRK2 promoter/enhancer regions on the BAC transgene. These mice represent an in vivo model for studying the dominant toxic effects of mutant LRRK2*G2019S expression. Mouse age was staggered across treatments to controls for assay expression differences with age, although age was not expected to impact baseline variability during the experimental time course, and functional data of 6- and 12-month old mice did not show an age-related difference.

[0735] The control group included 4 animals and each of the RNAi agents of interest (described in Tables 7 and 13, and FIG. 1) is administered to a group of 4 animals. The administration was through a single intracerebroventricular injection (free-hand ICV injection) administered at a dose of 150 μg in 10 μl (15 mg/ml stock). Plasma was collected at day fourteen (14) post-administration and stored at −80° C. until assaying. At fourteen (14) days post-administration, mice were euthanized. Plasma was isolated and stored at −80° C. until assaying. Brain (right hemisphere), liver tissue, lung (left lobe), and kidney (left) are collected, flash-frozen and stored at −80° C. until processing. The study design is summarized in Table 14.

TABLE 13
Exemplary LRRK2 Duplexes and Corresponding Chemistry

| | | | SEQ ID |
|---|---|---|---|
| Duplex ID | Strand | Modified Sequence | NO: |
| AD-1807334 | sense | csusugu(Uhd)UfgUfAfUfugcaauucscsa | 1990 |
| | antisense | VPusGfsgadAu(Tgn)gcaauaCfaAfacaagsusg | 2080 |
| AD-1807336 | sense | csasuga(Ahd)guGfCfAfaaauuuagsasa | 1992 |
| | antisense | VPusdTscudAadAuuuudGcAfcuucaugsusg | 2082 |
| AD-1807339 | sense | usasaau(Chd)uuCfCfAfcacuugcgsgsa | 1995 |
| | antisense | VPusdCscgdCadAgugudGgAfagauuuasasa | 2085 |
| AD-1807344 | sense | usgsgau(Chd)uuUfCfAfacucgucgsasa | 2000 |
| | antisense | VPusdTscgdAcdGaguudGaAfagauccasgsg | 2090 |
| AD-1807345 | sense | csusgcc(Uhd)agAfAfAfuauuaugususa | 2001 |
| | antisense | VPusdAsacdAudAauaudTuCfuaggcagsgsu | 2091 |
| AD-1807349 | sense | csasgc(Uhd)gaaUfUfAfgucugucusgsa | 2005 |
| | antisense | VPusdCsagdAcdAgacudAaUfucagcugsasa | 2095 |
| AD-1807352 | sense | gscsuca(Chd)caUfUfCfcaauaucuscsa | 2008 |
| | antisense | VPusdGsagdAudAuuggdAaUfggugagcscsu | 2098 |
| AD-1807364 | sense | ascsaug(Ahd)agUfGfCfaaaauuuasgsa | 2020 |
| | antisense | VPusdCsuadAadTuuugdCaCfuucaugusgsg | 2110 |
| AD-1807370 | sense | csasuuc(Chd)AfaUfAfUfcucagauusgsa | 2026 |
| | antisense | VPusCfsaadTc(Tgn)gagauaUfuGfgaaugsgsu | 2116 |
| AD-1807374 | sense | gsasccug(Chd)cUfAfGfaaauauuasusa | 2030 |
| | antisense | VPusdAsuadAudAuuucdTaGfgcaggucsasg | 2120 |

TABLE 14
Study Design for Intracerebroventricular
Dosing of dsRNA Agents in Humanized Mice

| Group # | Animal # | Treatment | Dose (μg) | Timepoint | Tissue |
|---|---|---|---|---|---|
| 1 | 1-4 | aCSF | — | Day 14 | Terminal plasma |
| 2 | 5-8 | AD-1807334 | 150 | | Post-perfusion frozen |
| 3 | 9-12 | AD-1807336 | (150 mg/ml | | (qPCR): Right |
| 4 | 13-16 | AD-1807339 | in 10 μl) | | hemibrain (cerebellum |
| 5 | 17-20 | AD-1807344 | | | and olfactory bulbs |
| 6 | 21-24 | AD-1807345 | | | removed), Liver, Lung, |
| 7 | 25-28 | AD-1807349 | | | Kidney |
| 8 | 29-32 | AD-1807352 | | | Post-perfusion frozen |
| 9 | 33-36 | AD-1807364 | | | (protein): Left brain |
| 10 | 37-40 | AD-1807370 | | | hemisphere |
| 11 | 41-44 | AD-1807374 | | | Post-perfusion fixed |
| | | | | | (histology): Lung, |
| | | | | | Kidney |

Efficacy of the RNAi agents was evaluated by the measurement of LRRK2 mRNA in brain, liver, lung and kidney tissues at 14 days post-dose. LRRK2 brain mRNA levels were assayed utilizing RT-qPCR. Mouse brain (right hemisphere) samples were ground and tissue lysates were prepared. The mRNA levels in the brain lysates (and CSF as an endogenous control) was assayed by RT-qPCR using mouse Xpnpep1 probe (Applied Biosystems) as the control probe and a suitable LRRK2 probe (e.g., Hs00968198), and mRNA levels were determined (see. e.g., above and Jiang, supra). The mRNA levels in the liver, lung, and kidney tissue are assayed by RT-qPCR using mouse Xpnpep1 probe (Applied Biosystems) as the control probe and a suitable LRRK2 probe (e.g., Hs01115057_ml, Hs00968198, Hs00411197, Mm00481934_ml, experimental probe).

[0736] Efficacy of the RNAi agents is also evaluated by the measurement of LRRK2 protein and the histological assessment in the 14-day post-dose brain, liver, lung, or kidney tissues.

### Results

[0737] The results of the in vivo evaluation of LRRK2-targeting dsRNA agents in Tables 7, 13, and FIG. 1 are shown in Table 15 and FIG. 2. The results demonstrate the ability of the exemplary dsRNA agents to reduce the LRRK2 mRNA levels in vivo in the brain.

TABLE 15
In Vivo Evaluation of LRRK2 dsRNA Agents

Brain

| | Avg % LRRK2 | |
|---|---|---|
| Tissue | mRNA Remaining | SD |
| aCSF | 100.0 | 22.1 |
| AD-1807334 | 68.2 | 14.8 |
| AD-1807336 | 71.1 | 4.8 |
| AD-1807339 | 82.2 | 10.0 |
| AD-1807344 | 68.8 | 10.5 |
| AD-1807345 | 88.8 | 10.9 |
| AD-1807349 | 83.6 | 19.3 |
| AD-1807352 | 82.5 | 15.7 |
| AD-1807364 | 88.0 | 15.1 |
| AD-1807370 | 86.8 | 16.8 |
| AD-1807374 | 73.6 | 13.1 |

### Example 4. Evaluation of LRRK2 RNAi Agents in vivo in Mice

[0738] This Example describes methods to evaluate high performing dsRNA agents at a higher dose.

[0739] To assess the efficacy of the RNAi agent of interest, the agent is administered to the MIFF mice that has the human LRRK2 gene with the pathogenic G2019S mutation. There are a total of 5 groups including to a control (aCSF) group had 4 other groups corresponding to 4 different RNAi agents (e.g., AD-1807334, AD-1807336, AD-1807344, and AD-1807374) at 300 μg as shown below in Table 16 with an exemplary study plan. Each group has 4 animals. The administration is through a single intracerebroventricular injection (free-hand ICV injection) administered into the brain right hemisphere in 10 μl (30 mg/ml stock). Fourteen (14) days post-administration, mice are euthanized and perfused with saline prior to tissue collection. Whole blood and plasma are isolated and stored at −80° C. until assaying. Brain (right hemisphere), liver tissue, lung (left lobe) and kidney (left) are collected, flash-frozen and stored at −80° C. until processing. Tissue samples and terminal blood are also collected for future protein analysis. An exemplary study design is shown in Table 14.

TABLE 16
Study Design for LRRK2 RNAi Agents in vivo Evaluation

| | | Dose | | | Time- | |
|---|---|---|---|---|---|---|
| Group | Treatment | (μg) | Dosing | Injection | point | (n) |
| 1 | aCSF | — | Single | Freehand | D 14 | 4 |
| 2 | AD-1807334 | 300 | dose D 0 | ICV | | |
| 3 | AD-1807336 | | | | | |
| 4 | AD-1807344 | | | | | |
| 5 | AD-1807374 | | | | | |

[0740] Efficacy and dose response of the RNAi agent are evaluated by the measurement of the percentage of LRRK2 mRNA remaining in brain, liver, lung and kidney tissues at 14 days post-dose of the RNAi agent. LRRK2 brain mRNA levels are assayed utilizing RT-qPCR. Mouse brain (right hemisphere) samples are ground and tissue lysates are prepared. The brain lysate sample is incubated with a suitable LRRK2 probe (e.g., Hs01115057 ml, Hs00968198, Hs00411197, Mm00481934 ml) and CSF as an endogenous control. mRNA levels are determined in brain samples by RT-qPCR (see, e.g., above and Jiang, supra). The mRNA levels in the liver, lung, and kidney tissues are assayed by RT-qPCR using mouse Xpnpep1 probe (Applied Biosystems) as the control probe and LRRK2 probe (e.g., Hs01115057 ml, Hs00968198, Hs00411197, Mm00481934_ml as the experimental probe).

### EQUIVALENTS

[0741] Those skilled in the art will recognize, or be able to ascertain using no more than routine experimentation, many equivalents to the specific embodiments and methods described herein. Such equivalents are intended to be encompassed by the scope of the following claims.

LRRK2 SEQUENCES

SEQ ID NO: 1
>NM_198578.4 Homo sapiens leucine rich repeat kinase 2 (LRRK2), mRNA
GGGGCCCGCGGGGAGCGCTGGCTGCGGGCGGTGAGCTGAGCTCGCCCCCGGGGAGCTGTGGCCGGCGCCCC
TGCCGGTTCCCTGAGCAGCGGACGTTCATGCTGGGAGGGCGGCGGGTTGGAAGCAGGTGCCACCATGGCTA
GTGGCAGCTGTCAGGGGTGCGAAGAGGACGAGGAAACTCTGAAGAAGTTGATAGTCAGGCTGAACAATGTC
CAGGAAGGAAAACAGATAGAAACGCTGGTCCAAATCCTGGAGGATCTGCTGGTGTTCACGTACTCCGAGCG
CGCCTCCAAGTTATTTCAAGGCAAAAATATCCATGTGCCTCTGTTGATCGTCTTGGACTCCTATATGAGAG
TCGCGAGTGTGCAGCAGGTGGGTTGGTCACTTCTGTGCAAATTAATAGAAGTCTGTCCAGGTACAATGCAA
AGCTTAATGGGACCCCAGGATGTTGGAAATGATTGGGAAGTCCTTGGTGTTCACCAATTGATTCTTAAAAT
GCTAACAGTTCATAATGCCAGTGTAAACTTGTCAGTGATTGGACTGAAGACCTTAGATCTCCTCCTAACTT
CAGGTAAAATCACCTTGCTGATATTGGATGAAGAAAGTGATATTTTCATGTTAATTTTTGATGCCATGCAC
TCATTTCCAGCCAATGATGAAGTCCAGAAACTTGGATGCAAAGCTTTACATGTGCTGTTTGAGAGAGTCTC
AGAGGAGCAACTGACTGAATTTGTTGAGAACAAAGATTATATGATATTGTTAAGTGCGTTAACAAATTTTA
AAGATGAAGAGGAAATTGTGCTTCATGTGCTGCATTGTTTACATTCCCTAGCGATTCCTTGCAATAATGTG
GAAGTCCTCATGAGTGGCAATGTCAGGTGTTATAATATTGTGGTGGAAGCTATGAAAGCATTCCCTATGAG
TGAAAGAATTCAAGAAGTGAGTTGCTGTTTGCTCCATAGGCTTACATTAGGTAATTTTTTCAATATCCTGG
TATTAAACGAAGTCCATGAGTTTGTGGTGAAAGCTGTGCAGCAGTACCCAGAGAATGCAGCATTGCAGATC
TCAGCGCTCAGCTGTTTGGCCCTCCTCACTGAGACTATTTTCTTAAATCAAGATTTAGAGGAAAAGAATGA
GAATCAAGAGAATGATGATGAGGGGGAAGAAGATAAATTGTTTTGGCTGGAAGCCTGTTACAAAGCATTAA
CGTGGCATAGAAAGAACAAGCACGTGCAGGAGGCCGCATGCTGGGCACTAAATAATCTCCTTATGTACCAA
AACAGTTTACATGAGAAGATTGGAGATGAAGATGGCCATTTCCCAGCTCATAGGGAAGTGATGCTCTCCAT
GCTGATGCATTCTTCATCAAAGGAAGTTTTCCAGGCATCTGCGAATGCATTGTCAACTCTCTTAGAACAAA
ATGTTAATTTCAGAAAAATACTGTTATCAAAAGGAATACACCTGAATGTTTTGGAGTTAATGCAGAAGCAT
ATACATTCTCCTGAAGTGGCTGAAAGTGGCTGTAAAATGCTAAATCATCTTTTTGAAGGAAGCAACACTTC
CCTGGATATAATGGCAGCAGTGGTCCCCAAAATACTAACAGTTATGAAACGTCATGAGACATCATTACCAG
TGCAGCTGGAGGCGCTTCGAGCTATTTTACATTTTATAGTGCCTGGCATGCCAGAAGAATCCAGGGAGGAT
ACAGAATTTCATCATAAGCTAAATATGGTTAAAAAACAGTGTTTCAAGAATGATATTCACAAACTGGTCCT
AGCAGCTTTGAACAGGTTCATTGGAAATCCTGGGATTCAGAAATGTGGATTAAAAGTAATTTCTTCTATTG
TACATTTTCCTGATGCATTAGAGATGTTATCCCTGGAAGGTGCTATGGATTCAGTGCTTCACACACTGCAG
ATGTATCCAGATGACCAAGAAATTCAGTGTCTGGGTTTAAGTCTTATAGGATACTTGATTACAAAGAAGAA
TGTGTTCATAGGAACTGGACATCTGCTGGCAAAAATTCTGGTTTCCAGCTTATACCGATTTAAGGATGTTG
CTGAAATACAGACTAAAGGATTTCAGACAATCTTAGCAATCCTCAAATTGTCAGCATCTTTTTCTAAGCTG
CTGGTGCATCATTCATTTGACTTAGTAATATTCCATCAAATGTCTTCCAATATCATGGAACAAAAGGATCA
ACAGTTTCTAAACCTCTGTTGCAAGTGTTTTGCAAAAGTAGCTATGGATGATTACTTAAAAAATGTGATGC
TAGAGAGAGCGTGTGATCAGAATAACAGCATCATGGTTGAATGCTTGCTTCTATTGGGAGCAGATGCCAAT
CAAGCAAAGGAGGGATCTTCTTTAATTTGTCAGGTATGTGAGAAAGAGAGCAGTCCCAAATTGGTGGAACT
CTTACTGAATAGTGGATCTCGTGAACAAGATGTACGAAAAGCGTTGACGATAAGCATTGGGAAAGGTGACA
GCCAGATCATCAGCTTGCTCTTAAGGAGGCTGGCCCTGGATGTGGCCAACAATAGCATTTGCCTTGGAGGA
TTTTGTATAGGAAAAGTTGAACCTTCTTGGCTTGGTCCTTTATTTCCAGATAAGACTTCTAATTTAAGGAA
ACAAACAAATATAGCATCTACACTAGCAAGAATGGTGATCAGATATCAGATGAAAAGTGCTGTGGAAGAAG
GAACAGCCTCAGGCAGCGATGGAAATTTTTCTGAAGATGTGCTGTCTAAATTTGATGAATGGACCTTTATT
CCTGACTCTTCTATGGACAGTGTGTTTGCTCAAAGTGATGACCTGGATAGTGAAGGAAGTGAAGGCTCATT
TCTTGTGAAAAAGAAATCTAATTCAATTAGTGTAGGAGAATTTTACCGAGATGCCGTATTACAGCGTTGCT
CACCAAATTTGCAAAGACATTCCAATTCCTTGGGGCCCATTTTTGATCATGAAGATTTACTGAAGCGAAAA
AGAAAAATATTATCTTCAGATGATTCACTCAGGTCATCAAAACTTCAATCCCATATGAGGCATTCAGACAG
CATTTCTTCTCTGGCTTCTGAGAGAGAATATATTACATCACTAGACCTTTCAGCAAATGAACTAAGAGATA
TTGATGCCCTAAGCCAGAAATGCTGTATAAGTGTTCATTTGGAGCATCTTGAAAAGCTGGAGCTTCACCAG
AATGCACTCACGAGCTTTCCACAACAGCTATGTGAAACTCTGAAGAGTTTGACACATTTGGACTTGCACAG
TAATAAATTTACATCATTTCCTTCTTATTTGTTGAAAATGAGTTGTATTGCTAATCTTGATGTCTCTCGAA
ATGACATTGGACCCTCAGTGGTTTTAGATCCTACAGTGAAATGTCCAACTCTGAAACAGTTTAACCTGTCA
TATAACCAGCTGTCTTTTGTACCTGAGAACCTCACTGATGTGGTAGAGAAACTGGAGCAGCTCATTTTAGA
AGGAAATAAAATATCAGGGATATGCTCCCCCTTGAGACTGAAGGAACTGAAGATTTTAAACCTTAGTAAGA
ACCACATTTCATCCCTATCAGAGAACTTTCTTGAGGCTTGTCCTAAAGTGGAGAGTTTCAGTGCCAGAATG
AATTTTCTTGCTGCTATGCCTTTCTTGCCTCCTTCTATGACAATCCTAAAATTATCTCAGAACAAATTTTC
CTGTATTCCAGAAGCAATTTTAAATCTTCCACACTTGCGGTCTTTAGATATGAGCAGCAATGATATTCAGT
ACCTACCAGGTCCCGCACACTGGAAATCTTTGAACTTAAGGGAACTCTTATTTAGCCATAATCAGATCAGC
ATCTTGGACTTGAGTGAAAAAGCATATTTATGGTCTAGAGTAGAGAAACTGCATCTTTCTCACAATAAACT
GAAAGAGATTCCTCCTGAGATTGGCTGTCTTGAAAATCTGACATCTCTGGATGTCAGTTACAACTTGGAAC
TAAGATCCTTTCCCAATGAAATGGGGAAATTAAGCAAAATATGGGATCTTCCTTTGGATGAACTGCATCTT
AACTTTGATTTTAAACATATAGGATGTAAAGCCAAAGACATCATAAGGTTTCTTCAACAGCGATTAAAAAA
GGCTGTGCCTTATAACCGAATGAAACTTATGATTGTGGGAAATACTGGGAGTGGTAAAACCACCTTATTGC
AGCAATTAATGAAAACCAAGAAATCAGATCTTGGAATGCAAAGTGCCACAGTTGGCATAGATGTGAAAGAC
TGGCCTATCCAAATAAGAGACAAAAGAAAGAGAGATCTCGTCCTAAATGTGTGGGATTTTGCAGGTCGTGA
GGAATTCTATAGTACTCATCCCCATTTTATGACGCAGCGAGCATTGTACCTTGCTGTCTATGACCTCAGCA
AGGGACAGGCTGAAGTTGATGCCATGAAGCCTTGGCTCTTCAATATAAAGGCTCGCGCTTCTTCTTCCCCT
GTGATTCTCGTTGGCACACATTTGGATGTTTCTGATGAGAAGCAACGCAAAGCCTGCATGAGTAAAATCAC
CAAGGAACTCCTGAATAAGCGAGGGTTCCCTGCCATACGAGATTACCACTTTGTGAATGCCACCGAGGAAT
CTGATGCTTTGGCAAAACTTCGGAAAACCATCATAAACGAGAGCCTTAATTTCAAGATCCGAGATCAGCTT
GTTGTTGGACAGCTGATTCCAGACTGCTATGTAGAACTTGAAAAAATCATTTTATCGGAGCGTAAAAATGT
GCCAATTGAATTTCCCGTAATTGACCGGAAACGATTATTACAACTAGTGAGAGAAAATCAGCTGCAGTTAG
ATGAAAATGAGCTTCCTCACGCAGTTCACTTTCTAAATGAATCAGGAGTCCTTCTTCATTTTCAAGACCCA
GCACTGCAGTTAAGTGACTTGTACTTTGTGGAACCCAAGTGGCTTTGTAAAATCATGGCACAGATTTTGAC
AGTGAAAGTGGAAGGTTGTCCAAAACACCCTAAGGGCATTATTTCGCGTAGAGATGTGGAAAAATTTCTTT
CAAAAAAAAGGAAATTTCCAAAGAACTACATGTCACAGTATTTTAAGCTCCTAGAAAAATTCCAGATTGCT
TTGCCAATAGGAGAAGAATATTTGCTGGTTCCAAGCAGTTTGTCTGACCACAGGCCTGTGATAGAGCTTCC
CCATTGTGAGAACTCTGAAATTATCATCCGACTATATGAAATGCCTTATTTTCCAATGGGATTTTGGTCAA
GATTAATCAATCGATTACTTGAGATTTCACCTTACATGCTTTCAGGGAGAGAACGAGCACTTCGCCCAAAC
AGAATGTATTGGCGACAAGGCATTTACTTAAATTGGTCTCCTGAAGCTTATTGTCTGGTAGGATCTGAAGT
CTTAGACAATCATCCAGAGAGTTTCTTAAAAATTACAGTTCCTTCTTGTAGAAAAGGCTGTATTCTTTTGG
GCCAAGTTGTGGACCACATTGATTCTCTCATGGAAGAATGGTTTCCTGGGTTGCTGGAGATTGATATTTGT
GGTGAAGGAGAAACTCTGTTGAAGAAATGGGCATTATATAGTTTTAATGATGGTGAAGAACATCAAAAAAT
CTTACTTGATGACTTGATGAAGAAAGCAGAGGAAGGAGATCTCTTAGTAAATCCAGATCAACCAAGGCTCA
CCATTCCAATATCTCAGATTGCCCCTGACTTGATTTTGGCTGACCTGCCTAGAAATATTATGTTGAATAAT
GATGAGTTGGAATTTGAACAAGCTCCAGAGTTTCTCCTAGGTGATGGCAGTTTTGGATCAGTTTACCGAGC
AGCCTATGAAGGAGAAGAAGTGGCTGTGAAGATTTTTAATAAACATACATCACTCAGGCTGTTAAGACAAG
AGCTTGTGGTGCTTTGCCACCTCCACCACCCCAGTTTGATATCTTTGCTGGCAGCTGGGATTCGTCCCCGG
ATGTTGGTGATGGAGTTAGCCTCCAAGGGTTCCTTGGATCGCCTGCTTCAGCAGGACAAAGCCAGCCTCAC
TAGAACCCTACAGCACAGGATTGCACTCCACGTAGCTGATGGTTTGAGATACCTCCACTCAGCCATGATTA
TATACCGAGACCTGAAACCCCACAATGTGCTGCTTTTCACACTGTATCCCAATGCTGCCATCATTGCAAAG
ATTGCTGACTACGGCATTGCTCAGTACTGCTGTAGAATGGGGATAAAAACATCAGAGGGCACACCAGGGTT
TCGTGCACCTGAAGTTGCCAGAGGAAATGTCATTTATAACCAACAGGCTGATGTTTATTCATTTGGTTTAC
TACTCTATGACATTTTGACAACTGGAGGTAGAATAGTAGAGGGTTTGAAGTTTCCAAATGAGTTTGATGAA
TTAGAAATACAAGGAAAATTACCTGATCCAGTTAAAGAATATGGTTGTGCCCCATGGCCTATGGTTGAGAA
ATTAATTAAACAGTGTTTGAAAGAAAATCCTCAAGAAAGGCCTACTTCTGCCCAGGTCTTTGACATTTTGA
ATTCAGCTGAATTAGTCTGTCTGACGAGACGCATTTTATTACCTAAAAACGTAATTGTTGAATGCATGGTT
GCTACACATCACAACAGCAGGAATGCAAGCATTTGGCTGGGCTGTGGGCACACCGACAGAGGACAGCTCTC
ATTTCTTGACTTAAATACTGAAGGATACACTTCTGAGGAAGTTGCTGATAGTAGAATATTGTGCTTAGCCT
TGGTGCATCTTCCTGTTGAAAAGGAAAGCTGGATTGTGTCTGGGACACAGTCTGGTACTCTCCTGGTCATC
AATACCGAAGATGGGAAAAAGAGACATACCCTAGAAAAGATGACTGATTCTGTCACTTGTTTGTATTGCAA
TTCCTTTTCCAAGCAAAGCAAACAAAAAAATTTTCTTTTGGTTGGAACCGCTGATGGCAAGTTAGCAATTT
TTGAAGATAAGACTGTTAAGCTTAAAGGAGCTGCTCCTTTGAAGATACTAAATATAGGAAATGTCAGTACT
CCATTGATGTGTTTGAGTGAATCCACAAATTCAACGGAAAGAAATGTAATGTGGGGAGGATGTGGCACAAA
GATTTTCTCCTTTTCTAATGATTTCACCATTCAGAAACTCATTGAGACAAGAACAAGCCAACTGTTTTCTT
ATGCAGCTTTCAGTGATTCCAACATCATAACAGTGGTGGTAGACACTGCTCTCTATATTGCTAAGCAAAAT
AGCCCTGTTGTGGAAGTGTGGGATAAGAAAACTGAAAAACTCTGTGGACTAATAGACTGCGTGCACTTTTT
AAGGGAGGTAATGGTAAAAGAAAACAAGGAATCAAAACACAAAATGTCTTATTCTGGGAGAGTGAAAACCC
TCTGCCTTCAGAAGAACACTGCTCTTTGGATAGGAACTGGAGGAGGCCATATTTTACTCCTGGATCTTTCA
ACTCGTCGACTTATACGTGTAATTTACAACTTTTGTAATTCGGTCAGAGTCATGATGACAGCACAGCTAGG
AAGCCTTAAAAATGTCATGCTGGTATTGGGCTACAACCGGAAAAATACTGAAGGTACACAAAAGCAGAAAG
AGATACAATCTTGCTTGACCGTTTGGGACATCAATCTTCCACATGAAGTGCAAAATTTAGAAAAACACATT
GAAGTGAGAAAAGAATTAGCTGAAAAAATGAGACGAACATCTGTTGAGTAAGAGAGAAATAGGAATTGTCT
TTGGATAGGAAAATTATTCTCTCCTCTTGTAAATATTTATTTTAAAAATGTTCACATGGAAAGGGTACTCA
CATTTTTTGAAATAGCTCGTGTGTATGAAGGAATGTTATTATTTTTAATTTAAATATATGTAAAAATACTT
ACCAGTAAATGTGTATTTTAAAGAACTATTTAAAACACAATGTTATATTTCTTATAAATACCAGTTACTTT
CGTTCATTAATTAATGAAAATAAATCTGTGAAGTACCTAATTTAAGTACTCATACTAAAATTTATAAGGCC
GATAATTTTTTGTTTTCTTGTCTGTAATGGAGGTAAACTTTATTTTAAATTCTGTGCTTAAGACAGGACTA
TTGCTTGTCGATTTTTCTAGAAATCTGCACGGTATAATGAAAATATTAAGACAGTTTCCCATGTAATGTAT
TCCTTCTTAGATTGCATCGAAATGCACTATCATATATGCTTGTAAATATTCAAATGAATTTGCACTAATAA
AGTCCTTTGTTGGTATGTGAATTCTCTTTGTTGCTGTTGCAAACAGTGCATCTTACACAACTTCACTCAAT
TCAAAAGAAAACTCCATTAAAAGTACTAATGAAAAAACATGACATACTGTCAAAGTCCTCATATCTAGGAA
AGACACAGAAACTCTCTTTGTCACAGAAACTCTCTGTGTCTTTCCTAGACATAATAGAGTTGTTTTTCAAC
TCTATGTTTGAATGTGGATACCCTGAATTTTGTATAATTAGTGTAAATACAGTGTTCAGTCCTTCAAGTGA
TATTTTTATTTTTTTATTCATACCACTAGCTACTTGTTTTCTAATCTGCTTCATTCTAATGCTTATATTCA
TCTTTTCCCTAAATTTGTGATGCTGCAGATCCTACATCATTCAGATAGAAACCTTTTTTTTTTTCAGAATT
ATAGAATTCCACAGCTCCTACCAAGACCATGAGGATAAATATCTAACACTTTTCAGTTGCTGAAGGAGAAA
GGAGCTTTAGTTATGATGGATAAAAATATCTGCCACCCTAGGCTTCCAAATTATACTTAAATTGTTTACAT
AGCTTACCACAATAGGAGTATCAGGGCCAAATACCTATGTAATAATTTGAGGTCATTTCTGCTTTAGGAAA
AGTACTTTCGGTAAATTCTTTGGCCCTGACCAGTATTCATTATTTCAGATAATTCCCTGTGATAGGACAAC
TAGTACATTTAATATTCTCAGAACTTATGGCATTTTACTATGTGAAAACTTTAAATTTATTTATATTAAGG
GTAATCAAATTCTTAAAGATGAAAGATTTTCTGTATTTTAAAGGAAGCTATGCTTTAACTTGTTATGTAAT
TAACAAAAAAATCATATATAATAGAGCTCTTTGTTCCAGTGTTATCTCTTTCATTGTTACTTTGTATTTGC
AATTTTTTTTACCAAAGACAAATTAAAAAAATGAATACCATATTTAAATGGAATAATAAAGGTTTTTTAAA
AACTTTAAA
SEQ ID NO: 2
>Reverse Complement of SEQ ID NO: 1
TTTAAAGTTTTTAAAAAACCTTTATTATTCCATTTAAATATGGTATTCATTTTTTTAATTTGTCTTTGGTA
AAAAAAATTGCAAATACAAAGTAACAATGAAAGAGATAACACTGGAACAAAGAGCTCTATTATATATGATT
TTTTTGTTAATTACATAACAAGTTAAAGCATAGCTTCCTTTAAAATACAGAAAATCTTTCATCTTTAAGAA
TTTGATTACCCTTAATATAAATAAATTTAAAGTTTTCACATAGTAAAATGCCATAAGTTCTGAGAATATTA
AATGTACTAGTTGTCCTATCACAGGGAATTATCTGAAATAATGAATACTGGTCAGGGCCAAAGAATTTACC
GAAAGTACTTTTCCTAAAGCAGAAATGACCTCAAATTATTACATAGGTATTTGGCCCTGATACTCCTATTG
TGGTAAGCTATGTAAACAATTTAAGTATAATTTGGAAGCCTAGGGTGGCAGATATTTTTATCCATCATAAC
TAAAGCTCCTTTCTCCTTCAGCAACTGAAAAGTGTTAGATATTTATCCTCATGGTCTTGGTAGGAGCTGTG
GAATTCTATAATTCTGAAAAAAAAAAAGGTTTCTATCTGAATGATGTAGGATCTGCAGCATCACAAATTTA
GGGAAAAGATGAATATAAGCATTAGAATGAAGCAGATTAGAAAACAAGTAGCTAGTGGTATGAATAAAAAA
ATAAAAATATCACTTGAAGGACTGAACACTGTATTTACACTAATTATACAAAATTCAGGGTATCCACATTC
AAACATAGAGTTGAAAAACAACTCTATTATGTCTAGGAAAGACACAGAGAGTTTCTGTGACAAAGAGAGTT
TCTGTGTCTTTCCTAGATATGAGGACTTTGACAGTATGTCATGTTTTTTCATTAGTACTTTTAATGGAGTT
TTCTTTTGAATTGAGTGAAGTTGTGTAAGATGCACTGTTTGCAACAGCAACAAAGAGAATTCACATACCAA
CAAAGGACTTTATTAGTGCAAATTCATTTGAATATTTACAAGCATATATGATAGTGCATTTCGATGCAATC
TAAGAAGGAATACATTACATGGGAAACTGTCTTAATATTTTCATTATACCGTGCAGATTTCTAGAAAAATC
GACAAGCAATAGTCCTGTCTTAAGCACAGAATTTAAAATAAAGTTTACCTCCATTACAGACAAGAAAACAA
AAAATTATCGGCCTTATAAATTTTAGTATGAGTACTTAAATTAGGTACTTCACAGATTTATTTTCATTAAT
TAATGAACGAAAGTAACTGGTATTTATAAGAAATATAACATTGTGTTTTAAATAGTTCTTTAAAATACACA
TTTACTGGTAAGTATTTTTACATATATTTAAATTAAAAATAATAACATTCCTTCATACACACGAGCTATTT
CAAAAAATGTGAGTACCCTTTCCATGTGAACATTTTTAAAATAAATATTTACAAGAGGAGAGAATAATTTT
CCTATCCAAAGACAATTCCTATTTCTCTCTTACTCAACAGATGTTCGTCTCATTTTTTCAGCTAATTCTTT
TCTCACTTCAATGTGTTTTTCTAAATTTTGCACTTCATGTGGAAGATTGATGTCCCAAACGGTCAAGCAAG
ATTGTATCTCTTTCTGCTTTTGTGTACCTTCAGTATTTTTCCGGTTGTAGCCCAATACCAGCATGACATTT
TTAAGGCTTCCTAGCTGTGCTGTCATCATGACTCTGACCGAATTACAAAAGTTGTAAATTACACGTATAAG
TCGACGAGTTGAAAGATCCAGGAGTAAAATATGGCCTCCTCCAGTTCCTATCCAAAGAGCAGTGTTCTTCT
GAAGGCAGAGGGTTTTCACTCTCCCAGAATAAGACATTTTGTGTTTTGATTCCTTGTTTTCTTTTACCATT
ACCTCCCTTAAAAAGTGCACGCAGTCTATTAGTCCACAGAGTTTTTCAGTTTTCTTATCCCACACTTCCAC
AACAGGGCTATTTTGCTTAGCAATATAGAGAGCAGTGTCTACCACCACTGTTATGATGTTGGAATCACTGA
AAGCTGCATAAGAAAACAGTTGGCTTGTTCTTGTCTCAATGAGTTTCTGAATGGTGAAATCATTAGAAAAG
GAGAAAATCTTTGTGCCACATCCTCCCCACATTACATTTCTTTCCGTTGAATTTGTGGATTCACTCAAACA
CATCAATGGAGTACTGACATTTCCTATATTTAGTATCTTCAAAGGAGCAGCTCCTTTAAGCTTAACAGTCT
TATCTTCAAAAATTGCTAACTTGCCATCAGCGGTTCCAACCAAAAGAAAATTTTTTTGTTTGCTTTGCTTG
GAAAAGGAATTGCAATACAAACAAGTGACAGAATCAGTCATCTTTTCTAGGGTATGTCTCTTTTTCCCATC
TTCGGTATTGATGACCAGGAGAGTACCAGACTGTGTCCCAGACACAATCCAGCTTTCCTTTTCAACAGGAA
GATGCACCAAGGCTAAGCACAATATTCTACTATCAGCAACTTCCTCAGAAGTGTATCCTTCAGTATTTAAG
TCAAGAAATGAGAGCTGTCCTCTGTCGGTGTGCCCACAGCCCAGCCAAATGCTTGCATTCCTGCTGTTGTG
ATGTGTAGCAACCATGCATTCAACAATTACGTTTTTAGGTAATAAAATGCGTCTCGTCAGACAGACTAATT
CAGCTGAATTCAAAATGTCAAAGACCTGGGCAGAAGTAGGCCTTTCTTGAGGATTTTCTTTCAAACACTGT
TTAATTAATTTCTCAACCATAGGCCATGGGGCACAACCATATTCTTTAACTGGATCAGGTAATTTTCCTTG
TATTTCTAATTCATCAAACTCATTTGGAAACTTCAAACCCTCTACTATTCTACCTCCAGTTGTCAAAATGT
CATAGAGTAGTAAACCAAATGAATAAACATCAGCCTGTTGGTTATAAATGACATTTCCTCTGGCAACTTCA
GGTGCACGAAACCCTGGTGTGCCCTCTGATGTTTTTATCCCCATTCTACAGCAGTACTGAGCAATGCCGTA
GTCAGCAATCTTTGCAATGATGGCAGCATTGGGATACAGTGTGAAAAGCAGCACATTGTGGGGTTTCAGGT
CTCGGTATATAATCATGGCTGAGTGGAGGTATCTCAAACCATCAGCTACGTGGAGTGCAATCCTGTGCTGT
AGGGTTCTAGTGAGGCTGGCTTTGTCCTGCTGAAGCAGGCGATCCAAGGAACCCTTGGAGGCTAACTCCAT
CACCAACATCCGGGGACGAATCCCAGCTGCCAGCAAAGATATCAAACTGGGGTGGTGGAGGTGGCAAAGCA
CCACAAGCTCTTGTCTTAACAGCCTGAGTGATGTATGTTTATTAAAAATCTTCACAGCCACTTCTTCTCCT
TCATAGGCTGCTCGGTAAACTGATCCAAAACTGCCATCACCTAGGAGAAACTCTGGAGCTTGTTCAAATTC
CAACTCATCATTATTCAACATAATATTTCTAGGCAGGTCAGCCAAAATCAAGTCAGGGGCAATCTGAGATA
TTGGAATGGTGAGCCTTGGTTGATCTGGATTTACTAAGAGATCTCCTTCCTCTGCTTTCTTCATCAAGTCA
TCAAGTAAGATTTTTTGATGTTCTTCACCATCATTAAAACTATATAATGCCCATTTCTTCAACAGAGTTTC
TCCTTCACCACAAATATCAATCTCCAGCAACCCAGGAAACCATTCTTCCATGAGAGAATCAATGTGGTCCA
CAACTTGGCCCAAAAGAATACAGCCTTTTCTACAAGAAGGAACTGTAATTTTTAAGAAACTCTCTGGATGA
TTGTCTAAGACTTCAGATCCTACCAGACAATAAGCTTCAGGAGACCAATTTAAGTAAATGCCTTGTCGCCA
ATACATTCTGTTTGGGCGAAGTGCTCGTTCTCTCCCTGAAAGCATGTAAGGTGAAATCTCAAGTAATCGAT
TGATTAATCTTGACCAAAATCCCATTGGAAAATAAGGCATTTCATATAGTCGGATGATAATTTCAGAGTTC
TCACAATGGGGAAGCTCTATCACAGGCCTGTGGTCAGACAAACTGCTTGGAACCAGCAAATATTCTTCTCC
TATTGGCAAAGCAATCTGGAATTTTTCTAGGAGCTTAAAATACTGTGACATGTAGTTCTTTGGAAATTTCC
TTTTTTTTGAAAGAAATTTTTCCACATCTCTACGCGAAATAATGCCCTTAGGGTGTTTTGGACAACCTTCC
ACTTTCACTGTCAAAATCTGTGCCATGATTTTACAAAGCCACTTGGGTTCCACAAAGTACAAGTCACTTAA
CTGCAGTGCTGGGTCTTGAAAATGAAGAAGGACTCCTGATTCATTTAGAAAGTGAACTGCGTGAGGAAGCT
CATTTTCATCTAACTGCAGCTGATTTTCTCTCACTAGTTGTAATAATCGTTTCCGGTCAATTACGGGAAAT
TCAATTGGCACATTTTTACGCTCCGATAAAATGATTTTTTCAAGTTCTACATAGCAGTCTGGAATCAGCTG
TCCAACAACAAGCTGATCTCGGATCTTGAAATTAAGGCTCTCGTTTATGATGGTTTTCCGAAGTTTTGCCA
AAGCATCAGATTCCTCGGTGGCATTCACAAAGTGGTAATCTCGTATGGCAGGGAACCCTCGCTTATTCAGG
AGTTCCTTGGTGATTTTACTCATGCAGGCTTTGCGTTGCTTCTCATCAGAAACATCCAAATGTGTGCCAAC
GAGAATCACAGGGGAAGAAGAAGCGCGAGCCTTTATATTGAAGAGCCAAGGCTTCATGGCATCAACTTCAG
CCTGTCCCTTGCTGAGGTCATAGACAGCAAGGTACAATGCTCGCTGCGTCATAAAATGGGGATGAGTACTA
TAGAATTCCTCACGACCTGCAAAATCCCACACATTTAGGACGAGATCTCTCTTTCTTTTGTCTCTTATTTG
GATAGGCCAGTCTTTCACATCTATGCCAACTGTGGCACTTTGCATTCCAAGATCTGATTTCTTGGTTTTCA
TTAATTGCTGCAATAAGGTGGTTTTACCACTCCCAGTATTTCCCACAATCATAAGTTTCATTCGGTTATAA
GGCACAGCCTTTTTTAATCGCTGTTGAAGAAACCTTATGATGTCTTTGGCTTTACATCCTATATGTTTAAA
ATCAAAGTTAAGATGCAGTTCATCCAAAGGAAGATCCCATATTTTGCTTAATTTCCCCATTTCATTGGGAA
AGGATCTTAGTTCCAAGTTGTAACTGACATCCAGAGATGTCAGATTTTCAAGACAGCCAATCTCAGGAGGA
ATCTCTTTCAGTTTATTGTGAGAAAGATGCAGTTTCTCTACTCTAGACCATAAATATGCTTTTTCACTCAA
GTCCAAGATGCTGATCTGATTATGGCTAAATAAGAGTTCCCTTAAGTTCAAAGATTTCCAGTGTGCGGGAC
CTGGTAGGTACTGAATATCATTGCTGCTCATATCTAAAGACCGCAAGTGTGGAAGATTTAAAATTGCTTCT
GGAATACAGGAAAATTTGTTCTGAGATAATTTTAGGATTGTCATAGAAGGAGGCAAGAAAGGCATAGCAGC
AAGAAAATTCATTCTGGCACTGAAACTCTCCACTTTAGGACAAGCCTCAAGAAAGTTCTCTGATAGGGATG
AAATGTGGTTCTTACTAAGGTTTAAAATCTTCAGTTCCTTCAGTCTCAAGGGGGAGCATATCCCTGATATT
TTATTTCCTTCTAAAATGAGCTGCTCCAGTTTCTCTACCACATCAGTGAGGTTCTCAGGTACAAAAGACAG
CTGGTTATATGACAGGTTAAACTGTTTCAGAGTTGGACATTTCACTGTAGGATCTAAAACCACTGAGGGTC
CAATGTCATTTCGAGAGACATCAAGATTAGCAATACAACTCATTTTCAACAAATAAGAAGGAAATGATGTA
AATTTATTACTGTGCAAGTCCAAATGTGTCAAACTCTTCAGAGTTTCACATAGCTGTTGTGGAAAGCTCGT
GAGTGCATTCTGGTGAAGCTCCAGCTTTTCAAGATGCTCCAAATGAACACTTATACAGCATTTCTGGCTTA
GGGCATCAATATCTCTTAGTTCATTTGCTGAAAGGTCTAGTGATGTAATATATTCTCTCTCAGAAGCCAGA
GAAGAAATGCTGTCTGAATGCCTCATATGGGATTGAAGTTTTGATGACCTGAGTGAATCATCTGAAGATAA
TATTTTTCTTTTTCGCTTCAGTAAATCTTCATGATCAAAAATGGGCCCCAAGGAATTGGAATGTCTTTGCA
AATTTGGTGAGCAACGCTGTAATACGGCATCTCGGTAAAATTCTCCTACACTAATTGAATTAGATTTCTTT
TTCACAAGAAATGAGCCTTCACTTCCTTCACTATCCAGGTCATCACTTTGAGCAAACACACTGTCCATAGA
AGAGTCAGGAATAAAGGTCCATTCATCAAATTTAGACAGCACATCTTCAGAAAAATTTCCATCGCTGCCTG
AGGCTGTTCCTTCTTCCACAGCACTTTTCATCTGATATCTGATCACCATTCTTGCTAGTGTAGATGCTATA
TTTGTTTGTTTCCTTAAATTAGAAGTCTTATCTGGAAATAAAGGACCAAGCCAAGAAGGTTCAACTTTTCC
TATACAAAATCCTCCAAGGCAAATGCTATTGTTGGCCACATCCAGGGCCAGCCTCCTTAAGAGCAAGCTGA
TGATCTGGCTGTCACCTTTCCCAATGCTTATCGTCAACGCTTTTCGTACATCTTGTTCACGAGATCCACTA
TTCAGTAAGAGTTCCACCAATTTGGGACTGCTCTCTTTCTCACATACCTGACAAATTAAAGAAGATCCCTC
CTTTGCTTGATTGGCATCTGCTCCCAATAGAAGCAAGCATTCAACCATGATGCTGTTATTCTGATCACACG
CTCTCTCTAGCATCACATTTTTTAAGTAATCATCCATAGCTACTTTTGCAAAACACTTGCAACAGAGGTTT
AGAAACTGTTGATCCTTTTGTTCCATGATATTGGAAGACATTTGATGGAATATTACTAAGTCAAATGAATG
ATGCACCAGCAGCTTAGAAAAAGATGCTGACAATTTGAGGATTGCTAAGATTGTCTGAAATCCTTTAGTCT
GTATTTCAGCAACATCCTTAAATCGGTATAAGCTGGAAACCAGAATTTTTGCCAGCAGATGTCCAGTTCCT
ATGAACACATTCTTCTTTGTAATCAAGTATCCTATAAGACTTAAACCCAGACACTGAATTTCTTGGTCATC
TGGATACATCTGCAGTGTGTGAAGCACTGAATCCATAGCACCTTCCAGGGATAACATCTCTAATGCATCAG
GAAAATGTACAATAGAAGAAATTACTTTTAATCCACATTTCTGAATCCCAGGATTTCCAATGAACCTGTTC
AAAGCTGCTAGGACCAGTTTGTGAATATCATTCTTGAAACACTGTTTTTTAACCATATTTAGCTTATGATG
AAATTCTGTATCCTCCCTGGATTCTTCTGGCATGCCAGGCACTATAAAATGTAAAATAGCTCGAAGCGCCT
CCAGCTGCACTGGTAATGATGTCTCATGACGTTTCATAACTGTTAGTATTTTGGGGACCACTGCTGCCATT
ATATCCAGGGAAGTGTTGCTTCCTTCAAAAAGATGATTTAGCATTTTACAGCCACTTTCAGCCACTTCAGG
AGAATGTATATGCTTCTGCATTAACTCCAAAACATTCAGGTGTATTCCTTTTGATAACAGTATTTTTCTGA
AATTAACATTTTGTTCTAAGAGAGTTGACAATGCATTCGCAGATGCCTGGAAAACTTCCTTTGATGAAGAA
TGCATCAGCATGGAGAGCATCACTTCCCTATGAGCTGGGAAATGGCCATCTTCATCTCCAATCTTCTCATG
TAAACTGTTTTGGTACATAAGGAGATTATTTAGTGCCCAGCATGCGGCCTCCTGCACGTGCTTGTTCTTTC
TATGCCACGTTAATGCTTTGTAACAGGCTTCCAGCCAAAACAATTTATCTTCTTCCCCCTCATCATCATTC
TCTTGATTCTCATTCTTTTCCTCTAAATCTTGATTTAAGAAAATAGTCTCAGTGAGGAGGGCCAAACAGCT
GAGCGCTGAGATCTGCAATGCTGCATTCTCTGGGTACTGCTGCACAGCTTTCACCACAAACTCATGGACTT
CGTTTAATACCAGGATATTGAAAAAATTACCTAATGTAAGCCTATGGAGCAAACAGCAACTCACTTCTTGA
ATTCTTTCACTCATAGGGAATGCTTTCATAGCTTCCACCACAATATTATAACACCTGACATTGCCACTCAT
GAGGACTTCCACATTATTGCAAGGAATCGCTAGGGAATGTAAACAATGCAGCACATGAAGCACAATTTCCT
CTTCATCTTTAAAATTTGTTAACGCACTTAACAATATCATATAATCTTTGTTCTCAACAAATTCAGTCAGT
TGCTCCTCTGAGACTCTCTCAAACAGCACATGTAAAGCTTTGCATCCAAGTTTCTGGACTTCATCATTGGC
TGGAAATGAGTGCATGGCATCAAAAATTAACATGAAAATATCACTTTCTTCATCCAATATCAGCAAGGTGA
TTTTACCTGAAGTTAGGAGGAGATCTAAGGTCTTCAGTCCAATCACTGACAAGTTTACACTGGCATTATGA
ACTGTTAGCATTTTAAGAATCAATTGGTGAACACCAAGGACTTCCCAATCATTTCCAACATCCTGGGGTCC
CATTAAGCTTTGCATTGTACCTGGACAGACTTCTATTAATTTGCACAGAAGTGACCAACCCACCTGCTGCA
CACTCGCGACTCTCATATAGGAGTCCAAGACGATCAACAGAGGCACATGGATATTTTTGCCTTGAAATAAC
TTGGAGGCGCGCTCGGAGTACGTGAACACCAGCAGATCCTCCAGGATTTGGACCAGCGTTTCTATCTGTTT
TCCTTCCTGGACATTGTTCAGCCTGACTATCAACTTCTTCAGAGTTTCCTCGTCCTCTTCGCACCCCTGAC
AGCTGCCACTAGCCATGGTGGCACCTGCTTCCAACCCGCCGCCCTCCCAGCATGAACGTCCGCTGCTCAGG
GAACCGGCAGGGGCGCCGGCCACAGCTCCCCGGGGGCGAGCTCAGCTCACCGCCCGCAGCCAGCGCTCCCC
GCGGGCCCC
SEQ ID NO: 3
>XM_015151449.2 PREDICTED: Macaca mulatta leucine rich repeat kinase 2
(LRRK2), transcript variant X1, mRNA
ACGGGCACGGTCATCCCGGCCAGGCCCGGCTCCAGCAGCCCCACGGCCGCCGCCGAAGTTCTGCGCGGCCC
GTCGCCCCGGCGGAGCCTCTGGCAGGCCCCTGAGCTGGTTTTTTGGGGCCTGGCTGGGGGAGGAGGAAGCC
GAGCAGGAGGGCTCTGGAGAGGGAGGGCAACGCGGGGGGGGGAGCCACCGCCTTCCTCATAAACAGGCGGG
CGTGGGCGCCGACGGGGCCCCCGGGGAGCCCTGGCTGAGGGCGGTGAGCTGAGCTAGATCCCGGGGAGCTG
TGGCCGGCGCCCCTGCCGGTTCCCTGAGCAGCGGACGTTCGTGCTGGGAGGGCGGCGGGTTGGAAGCAGGG
GCCACCATGGCTAGTGGCAGCTGTCAGGGGTGCGAGGAGGACGAGGAAACTCTGAAGAAGTTGATAGTCAG
GCTGAACAATGTCCAGGAAGGTAAACAGATAGAAACGCTGGTCCAAATCCTGGAGGATCTGCTGGTGTTCA
CGTACTCCGAGCACGCCTCCAAGTTATTTCAAGGCAAAAATATCCATGTGCCTCTGTTGATCGTCTTGGAC
TCGTATATGAGAGTCGCGAGTGTGCAGCAGGTGGGTTGGTCACTTCTGTGCAAATTAATAGAAATCTGCCC
GGGTACAATGCAAAGCTTAATGGGACCCCAGGATGTTGGAAATGATTGGGAAGTCCTTGGTGTTCACCAAT
TGATTCTTAAAATGCTAACAGTTCATAATGCCAGTGTAAACTTGTCAATGATTGGACTGAAGACCTTAGAT
CTCCTCCTAACTTCAGGTAAAATCACCTTACTGATATTGGATGAAGAAAGTGATATTTTCATGTTAATTTT
TGATGCCATGCACTCATTTCCAGCCAATGATGAAATCCAGAAACTTGGATGCAAAGCTTTACATGTGCTGT
TTGAAAGAGTCTCAGAGGAGCAACTAACTGAATTTGTTGAGAACAAAGATTATATGATATTGTTAAGTGCG
TTAACAAATTTTAAAGATGAAGAGGAAATTGTGCTTCATGTACTGCATTGTTTACATTCCCTAGCAATTCC
TTGCAATAATGTGGAAGTCCTCATGAGTGGCAATGTCAGGTGTTATAATATTGTGGTGGAAGCTATGAAAG
CATTCCCTATCAGTGAAAAAATTCAAGAAGTGAGTTGCTGTTTGCTCCATAGGCTTACATTAGGTAATTTT
TTTAATATCCTGGTATTAAACGAAGTCCATGAATTTGTGGTGAAAGCTGTGCAGCGGTACCCAGAGAACGC
AGCATTACAGATCTCAGCGCTCAGCTGTTTGGCCCTCCTCACTGAGACCATTTTCTTAAATCAAGATTTAG
AGGAAAAGAATGAGAATCAAGAGAATGATGATGAGGGGGAAGAAGTTAAATTGTTTTGGCTGGAAGCCTGT
TACAAAGCGTTAACGTGGCATAGAAAGAACAAGCACGTGCAGGAGGCTGCATGCTGGGCACTAAATAATCT
CCTTATGTACCAAAACAGTTTACATGAGAAGATTGGAGATGAAGATGGCCATTTCCCAGCTCATAGGGAAG
TGATGCTGTCCATGCTGATGCATTCATCATCAAAGGAAGTTTTCCAGGCATCTGCTAATGCATTGTCAACT
CTTTTAGAACAAAATGTTAATTTCAGAAAAATCCTGTTATCAAAAGGAATATACCTGAATGTTTTGGAGTT
AATGCAGAAGCATATACATTCTCCTGAAGTGGCTGAAAGTGGCTGTAAAATGCTAAATCATCTTTTTGAAG
GAAGCAACACATCCCTGGATACAATGGCAGCAGTGCTCCCCAAAATAATAACAGTTATGAAAAGTCATGAG
ACATCATTACCAGTGCAGCTGGAGGCGCTTCGAGCTATTTTACATTTTATAGTGCCAGGCATGCCAGAAGA
ATCCAGAGAGGATGCAGAATCTCATCGTAAGCTAAATATGGTTAAAAAACAGTGTTTCAAGAATGATATTC
ACAAACTGGTCCTAGCAGCTTTGAACAGGTTCATTGGAAATCCTGGGATTCAGAAATGTGGATTAAAAGTA
ATTTCTTTTATTGCACATTTTACTGATGCATTAGGGGTGTTATCCCTGGAAGGTGCTGTGGATTCAGTGCT
TCACACACTGCAGATGTATCCAGATGACCAAGAAATTCAGTGTCTGGGTTTAAGTCTTATAGGATGCTTGA
TTACAAAGAAGAATTTATGCATAGGAACTGGACATCTGCTGGCAAAAATTCTGGCTTCCAGCTTATACCGA
TTTAAGGATGTTGCTGAAGTACAGACTGAAGGATTTCAGACAATCTTAGCAATCCTCAAATTGTCAGCATC
TTTTTCTAAGCTGCTGGTGCATCATTCGTTTGACTTAGTAATATTCCATCAAATGTCTTCCAGTATCATGG
AACAAAAGGATCAACAGTTTCTAAACCTCTGTTGCAAGTGTTTTGCAAAAGTAGCTATGGATGATGACTTA
AAAAATATGATGCTAGAGAGAGCGTGTGATCAGAATAACAGCATCATGGTTGAATGCTTGCTTCTATTAGG
AGCAGATGCCAATCAAGCAAAGGAGGGAACTTCTTTAATTTGTCAGGTATGTGAGAAAGAGAGCAGTCCCA
AATTGGTGGAACTCTTATTGAATAGTGGATCTCGTGAACAAGATGTACGAAAAGCGCTGACAATAAGCATT
GGGAAAGGCGACAGCCAGATCATCAGCTTGCTCTTAAGGAGGCTGGCCCTGGACATGGCCAACAATAGCAT
TTGCCTTGGAGGGTTTTGTATAGGAAAAGTTGAACCTTCTTGGCTTGGTCCTTTATTTCCAGATAAGACTT
CTAATTTAAGGAAACAAACAAATATAGCATCTACACTAGCAAGAATGGTGATCAGATATCAGATGAAAAGT
GCCATGGAAGAAGGAGCAGCCTCAGGCAGTGATGGAAATTTTTCTGAAGATGTGCTGTCTAAATTTGATGA
ATGGACCTTTATTCCTGACTCTTCTATGGACAGTGTCTTTGCTCAAAGTGATGATCTAGATAGTGAAGGAA
GTGAAGGCTCATTTCTTGTGAAAAAGAAATCAAATTCAATTAGTGTAGGAGAATTTTACCGAGATGCCGTA
TTACAACGTTGCTCACCAAATTTGCAAAGGCATTCCAGTTCCTTGGGGCCCATTTTTGATCATGAAGATTT
ACTGAGAAGAAAAAGAAAAATATTATCTTCAGATGATTCACTCAGGTCATCAAAACTTCAATCCCATATGA
GGCATTCAGACAGCATTTCTTCTCTGGCTTCTGAGAGAGAATATATTACATCACTAGACCTTTCAGCAAAT
GAACTAAGAGATATTGATGCCCTAAGCCAGAAATCCTGTATAAGTGGTCATTTGGAGCATCTTGAAAAGCT
GGAGCTTCACCAGAATGCACTCACGAGCTTTCCACAACAGCTATGTGAAACTCTGAAGAGTTTGACACATT
TGGACTTGCACAGTAATAAATTTACATCATTTCCTTCTTACTTGTTGAAAATGAGTTGTGTTGCTAACCTT
GATGTCTCTCGAAATGACATTGGACCCTCAGTGGTTTTAGATCCTGCAGTGAAATGTCCAACTCTGAAACA
GTTTAACCTGTCATATAACCAGCTGTCTTCTGTTCCTGAGAACCTTGCTGATGGGATAGAGAAACTGGAGC
AGCTCATTTTAGAAGGAAATAAAATATCAGGGATATGCTCCCCCTTGAGACTGAAGGAACTGAAGATTTTA
AACCTTAGTAAAAACCACATTTCATCCCTATCAGAGAACTTTCTTGAGGCTTGTCCTAAAGTGGAGAGTTT
CAGTGCCAGAATGAATTTTCTTGCTGCTATGCCTTTCTTGCCTCCTTCCATGACAAGCCTAAAATTATCTC
AAAACAAATTTACATGTATTCCAGAAGCAATTTTAAATCTTCCACACTTGCGGTCTTTAGATATGAGCAGC
AATGATATTCAATATCTACCAGGTCCTGCACACTGGAAATCTTTGAACTTAAGGGAACTCTTATTTAGCCA
TAATCAGATCAGCATCTTGGACTTGAGTGAAAAAGCGTATTTATGGTCTAGAGTAGAGAAACTGCATCTTT
CTCACAATAAACTGAAAGAGATTCCTCCTGAGATTGGCTGTCTTGAAAATCTGACATCTCTGGATGTCAGT
TACAACTTGGAACTAAGATCCTTTCCCAATGAAATGGGGAAATTAAGCAAAATATGGGATCTTCCTTTGGA
TGAACTGCGTCTTAACTTTGATTTTAAACATATAGGATGTAAAGCCAAAGACATCATAAGGTTTCTTCAGC
AGCGGTTAAAAAAGGCTGTGCCCTATAACCGAATGAAACTTATGGTTGTTGGAAATACTGGGAGTGGTAAA
ACCACCTTGTTGCAGCAATTAATGAAAACCAAGAAATCAGATCTTGGAATGCAAAGTGCCACAGTTGGCAT
AGATGTGAAAGACTGGCCTATCCAAATAAGAGGCAAAAGAAAGAGAGATCTCGTTCTGAATGTGTGGGATT
TTGCAGGTCGTGAGGAATTCTATAGCACTCATCCTCATTTTATGACGCAGCGAGCATTGTACCTTGCTGTC
TATGACCTTAGCAAAGGACAGGCTGAAGTTGATGCCATGAAGCCTTGGCTCTTCAATATAAAGGCTCGCGC
TTCTTCTTCCCCTGTGATTCTCGTTGGCACACATTTGGATGTTTCTGATGAGAGGCAGCGCAAAGCCTGCA
TAGGTAAAATCACCAAGGAACTCCTGAATAAGCGAGGGTTCCCTGCTATACGAGATTACCACTTTGTGAAT
GCCACCGAGGAATCTGATGCTTTGGCAAAACTTCGGAAAACCATCATAAACGAGAGCCTTAATTTCAAGAT
CCGAGATCAGCCTGTTGTTGGACAGCTGATTCCAGACTGCTATGTAGAACTTGAGAAAATCATTTTATCGG
AGCGTAAAAATGTGCCAATTGAATTTCCTGTAATTGACCAGAAACGATTATTACAACTAGTGAGAGAAAAT
CAGTTGCAGTTAGATGAAAATGAGCTTCCTCACGCAGTTCACTTTCTAAATGAATCAGGAGTCCTTCTTCA
TTTTCAAGACCCAGCACTGCAGTTAAGTGACTTGTATTTTGTGGAACCCAAGTGGCTTTGTAAAATCATGG
CACAGATTTTGACAGTGAAAGTGGAAGGTTGTCCAAAACACCCTAAGGGAATTATTTCACGTAGAGATGTG
GAAAAATTTCTTTCGAAGAAAAGGAGATTTCCAAAGAACTACATGTCACAGTATTTTAAGCTCCTAGAAAA
ATTCCAGATTGCTTTGCCAATAGGAGAAGAATATTTGCTGGTTCCAAGCAGTTTGTCTGACCACAGGCCTG
TGATAGAGCTTCCCCATTGTGAGAACTCTGAAATTATCATCCGACTATATGAAATGCCTTATTTTCCAATG
GGATTTTGGTCGAGGTTAATCAATCGATTACTTGAGATTTCACCTTACATGCTTTCAGGGAGAGAACGAGC
ACTTCGCCCAAACAGAATGTATTGGCGACAAGGCATCTACTTAAATTGGTCTCCTGAAGCTTATTGTCTGG
TAGGATCTGAAGTCTTAGACAATCACCCAGAGAGTTTCTTAAAAATTACAGTTCCTTCTTGTAGAAAAGGC
TGTATTCTTTTGGGCCAAGTTGTGGACCACATTGATTCTCTCATGGAGGAATGGTTTCCTGGGTTGCTGGA
GATTGATATTTGTGGTGAAGGAGAAACTCTGTTGAAGAAATGGGCATTATATAGTTTTAATGATGGTGAAG
AGCATCAAAAAATCTTACTTGATGACTTGATGAAGAAAGCAGAGGAAGGAGATCTCTTAGTAAATCCAGAT
CAACCAAGGCTCACCATTCCAATATCTCAGATTGCCCCTGACTTGATTTTGGCTGACCTGCCTAGAAATAT
TATGTTGAATAATGATGAGCTGGAATTTGAACAAGCTCCAGAGTTTCTCCTAGGTGATGGCAGTTTTGGAT
CAGTTTATCGAGCAGCCTATGAAGGAGAAGAAGTGGCTGTGAAGATTTTTAATAAACACACATCACTTAGG
CTGTTAAGACAAGAGCTGGTGGTGCTTTGCCACCTCCACCACCCCAGTTTGATATCTTTGCTGGCAGCTGG
TATTCGTCCCCGGATGTTGGTGATGGAGTTAGCCTCCAAGGGTTCCTTGGATCGCCTGCTTCAGCAGGACA
AAGCCAGCCTCACTAGAACCCTACAGCACAGGATTGCACTCCATGTGGCTGATGGTTTGAGATACCTCCAT
TCAGCCATGATTATATACCGAGACTTGAAGCCCCACAATGTGCTGCTTTTCACACTGTATCCCAATGCTGC
CATCATTGCAAAGATTGCTGACTACGGCATTGCTCAGTACTGCTGTAGAATGGGGATAAAAACGTCAGAGG
GCACACCAGGGTTTCGTGCACCTGAAGTTGCCAGAGGAAATGTCATTTATAATCAACAAGCTGATGTTTAT
TCATTTGGTTTGCTACTCTATGACATTTTGACAACTGGAGGTAGAATAGTAGAGGGTTTGAAGTTTCCAAA
TGAGTTTGATGAATTAGCAATACAAGGAAAATTACCTGATCCAGTTAAAGAATATGGTTGTGCCCCATGGC
CTATGGTTGAGAAATTAATTACAAAGTGTTTGAAAGAAAATCCTCAAGAAAGGCCTACTTCTGCCCAGGTC
TTTGACATTTTGAATTCAGCTGAATTAGTCTGTCTGACGAGACACATTTTATTACCTAAAAACGTAATTGT
TGACTGCATGGTTGCTACACATCACAACAGCAGGAATGCAAGCATTTGGCTGGGCTGTGGGCACACCAACA
GAGGACAGCTCTCATTTCTTGACTTAAATACTGAAGGATACACTTCTGAGGAGGTTGCTGATAGTAGAATA
TTGTGCTTAGCCTTGGTGCATCTTCCTGTTCAAAAAGAAAGCTGGATTGTGTCCGGGACACAGTCTGGTAC
TCTCCTGGTCATCAATACCGAAGATGGGAAAAAGAGACATACCCTAGAAAAGATGACTGATTCCATCACTT
GTTTGTATTGCAATTCCTTTTCCAAGCAAAGCAAACAAAAAAATTTTCTTTTGGTTGGAACCGCTGATGGC
AATTTAGCAATTTTTGAAGATAAAACTGTTAAGCTTGAAGGAGCTGCTCCTTTGAAGATACTAAATATAGG
AAATGTCAGTACTCCATTGATGTGTTTGAGTGAATCCACAAATTCAACAGAAAGAAATGTAATGTGGGGAG
GATGTGGCACAAAGATTTTCTCCTTTTCTAATGATTTCACCATTCAGAAACTCATTGAGACAAGAACAAGC
CAACTGTTCTCAAGTGATTCTAAAGTATATTCGAGGTTAAGATATACTGCAGACTGCAATGTATTGTTTTC
TTACGCAGCTTTCAGTGATTCCAACATCGTAACAGTGGTGGTAGACACTGTTCTCTATATTGCTAAGAAAA
ATAGCCCTGTTGTGGAAGTGTGGGATAAGAAAACTGAAAAACTCTGCGAACTAATAGACTGTGTGCATTTT
TTAAGGGAGGTAATGGTAAAAGTAAACAAGGAATCAAAACACAAAATGTCTTATTCTGGGAGAGTGAAAGC
TCTCTGCCTTCAGAAGAACACTGCTCTTTGGATAGGAACTGGAGGAGGCCATATTTTACTCCTGGATCTTT
CAACTCGTCGAGTTATACGTATAATTTACAACTTTTGTGATTCGGTCAGAGTCATGATGACAGCACAGCTA
GGGAGCCTTAAAAATGTCATGCTGGTATTGGGCTATAACCGGAAAAGTACTGAAGGTACACAACAGCAGAA
AGAGATACAATCTTGCTTGACTGTTTGGGACATCAATCTTCCACATGAAGTGCAAAATTTAGAAAAACACA
TTGAAGTGAGAAAAGAATTAGCTGAAAAAATGAGAGGAACATCTATTGAATAAGAGAGAAACAGGAATTGT
CTTTGGATAGGAAAATTATTCTCTTGTAAATATTTATTTAAAAATGTTCACATGAAAAGGGTACTCACATT
TTTTGAAATAGCTCATGTGTATATGAAGGAATGTTATATTTTTAATTTAAATATATGTAAAAATACTTACC
AGTAAACATATATTTTAAAGAACTATTTAAAACACAATGTTGTATTTCTTATGAATACCAGTTACTTTTGT
GCATTAATTAATGAAAATAAATCTGTGAAATACCTAATTTAAGTACTCATACTAAAATTTATAAGGCCGAT
AATTTTTTGTTTTCTTGTCTGTAATGAAGATAAACTTTATTTTAAATTCTATGCTTAAGACAAGACTATTG
CTTGTTGATTTTTCTAGAAATCCGCAAGGTAGAATGAAAATATTAAGACAGTTTCCCGTGTAATGTATTCC
CTCTTAGATTGCTTTGAAATGCACTATCATATATGCTTGCAAATATTCAAATGAATTTGCACTAATAAATT
CCTTTGTTGGTATGTGAATTCTCTTTGTTGCTGTTGCAGACAGTGCATCTTACACAACTTCACTCAATCCA
AAAGAAAACTCCATTAAAAGTACTAA
SEQ ID NO: 4
>Reverse Complement of SEQ ID NO: 3
TTAGTACTTTTAATGGAGTTTTCTTTTGGATTGAGTGAAGTTGTGTAAGATGCACTGTCTGCAACAGCAAC
AAAGAGAATTCACATACCAACAAAGGAATTTATTAGTGCAAATTCATTTGAATATTTGCAAGCATATATGA
TAGTGCATTTCAAAGCAATCTAAGAGGGAATACATTACACGGGAAACTGTCTTAATATTTTCATTCTACCT
TGCGGATTTCTAGAAAAATCAACAAGCAATAGTCTTGTCTTAAGCATAGAATTTAAAATAAAGTTTATCTT
CATTACAGACAAGAAAACAAAAAATTATCGGCCTTATAAATTTTAGTATGAGTACTTAAATTAGGTATTTC
ACAGATTTATTTTCATTAATTAATGCACAAAAGTAACTGGTATTCATAAGAAATACAACATTGTGTTTTAA
ATAGTTCTTTAAAATATATGTTTACTGGTAAGTATTTTTACATATATTTAAATTAAAAATATAACATTCCT
TCATATACACATGAGCTATTTCAAAAAATGTGAGTACCCTTTTCATGTGAACATTTTTAAATAAATATTTA
CAAGAGAATAATTTTCCTATCCAAAGACAATTCCTGTTTCTCTCTTATTCAATAGATGTTCCTCTCATTTT
TTCAGCTAATTCTTTTCTCACTTCAATGTGTTTTTCTAAATTTTGCACTTCATGTGGAAGATTGATGTCCC
AAACAGTCAAGCAAGATTGTATCTCTTTCTGCTGTTGTGTACCTTCAGTACTTTTCCGGTTATAGCCCAAT
ACCAGCATGACATTTTTAAGGCTCCCTAGCTGTGCTGTCATCATGACTCTGACCGAATCACAAAAGTTGTA
AATTATACGTATAACTCGACGAGTTGAAAGATCCAGGAGTAAAATATGGCCTCCTCCAGTTCCTATCCAAA
GAGCAGTGTTCTTCTGAAGGCAGAGAGCTTTCACTCTCCCAGAATAAGACATTTTGTGTTTTGATTCCTTG
TTTACTTTTACCATTACCTCCCTTAAAAAATGCACACAGTCTATTAGTTCGCAGAGTTTTTCAGTTTTCTT
ATCCCACACTTCCACAACAGGGCTATTTTTCTTAGCAATATAGAGAACAGTGTCTACCACCACTGTTACGA
TGTTGGAATCACTGAAAGCTGCGTAAGAAAACAATACATTGCAGTCTGCAGTATATCTTAACCTCGAATAT
ACTTTAGAATCACTTGAGAACAGTTGGCTTGTTCTTGTCTCAATGAGTTTCTGAATGGTGAAATCATTAGA
AAAGGAGAAAATCTTTGTGCCACATCCTCCCCACATTACATTTCTTTCTGTTGAATTTGTGGATTCACTCA
AACACATCAATGGAGTACTGACATTTCCTATATTTAGTATCTTCAAAGGAGCAGCTCCTTCAAGCTTAACA
GTTTTATCTTCAAAAATTGCTAAATTGCCATCAGCGGTTCCAACCAAAAGAAAATTTTTTTGTTTGCTTTG
CTTGGAAAAGGAATTGCAATACAAACAAGTGATGGAATCAGTCATCTTTTCTAGGGTATGTCTCTTTTTCC
CATCTTCGGTATTGATGACCAGGAGAGTACCAGACTGTGTCCCGGACACAATCCAGCTTTCTTTTTGAACA
GGAAGATGCACCAAGGCTAAGCACAATATTCTACTATCAGCAACCTCCTCAGAAGTGTATCCTTCAGTATT
TAAGTCAAGAAATGAGAGCTGTCCTCTGTTGGTGTGCCCACAGCCCAGCCAAATGCTTGCATTCCTGCTGT
TGTGATGTGTAGCAACCATGCAGTCAACAATTACGTTTTTAGGTAATAAAATGTGTCTCGTCAGACAGACT
AATTCAGCTGAATTCAAAATGTCAAAGACCTGGGCAGAAGTAGGCCTTTCTTGAGGATTTTCTTTCAAACA
CTTTGTAATTAATTTCTCAACCATAGGCCATGGGGCACAACCATATTCTTTAACTGGATCAGGTAATTTTC
CTTGTATTGCTAATTCATCAAACTCATTTGGAAACTTCAAACCCTCTACTATTCTACCTCCAGTTGTCAAA
ATGTCATAGAGTAGCAAACCAAATGAATAAACATCAGCTTGTTGATTATAAATGACATTTCCTCTGGCAAC
TTCAGGTGCACGAAACCCTGGTGTGCCCTCTGACGTTTTTATCCCCATTCTACAGCAGTACTGAGCAATGC
CGTAGTCAGCAATCTTTGCAATGATGGCAGCATTGGGATACAGTGTGAAAAGCAGCACATTGTGGGGCTTC
AAGTCTCGGTATATAATCATGGCTGAATGGAGGTATCTCAAACCATCAGCCACATGGAGTGCAATCCTGTG
CTGTAGGGTTCTAGTGAGGCTGGCTTTGTCCTGCTGAAGCAGGCGATCCAAGGAACCCTTGGAGGCTAACT
CCATCACCAACATCCGGGGACGAATACCAGCTGCCAGCAAAGATATCAAACTGGGGTGGTGGAGGTGGCAA
AGCACCACCAGCTCTTGTCTTAACAGCCTAAGTGATGTGTGTTTATTAAAAATCTTCACAGCCACTTCTTC
TCCTTCATAGGCTGCTCGATAAACTGATCCAAAACTGCCATCACCTAGGAGAAACTCTGGAGCTTGTTCAA
ATTCCAGCTCATCATTATTCAACATAATATTTCTAGGCAGGTCAGCCAAAATCAAGTCAGGGGCAATCTGA
GATATTGGAATGGTGAGCCTTGGTTGATCTGGATTTACTAAGAGATCTCCTTCCTCTGCTTTCTTCATCAA
GTCATCAAGTAAGATTTTTTGATGCTCTTCACCATCATTAAAACTATATAATGCCCATTTCTTCAACAGAG
TTTCTCCTTCACCACAAATATCAATCTCCAGCAACCCAGGAAACCATTCCTCCATGAGAGAATCAATGTGG
TCCACAACTTGGCCCAAAAGAATACAGCCTTTTCTACAAGAAGGAACTGTAATTTTTAAGAAACTCTCTGG
GTGATTGTCTAAGACTTCAGATCCTACCAGACAATAAGCTTCAGGAGACCAATTTAAGTAGATGCCTTGTC
GCCAATACATTCTGTTTGGGCGAAGTGCTCGTTCTCTCCCTGAAAGCATGTAAGGTGAAATCTCAAGTAAT
CGATTGATTAACCTCGACCAAAATCCCATTGGAAAATAAGGCATTTCATATAGTCGGATGATAATTTCAGA
GTTCTCACAATGGGGAAGCTCTATCACAGGCCTGTGGTCAGACAAACTGCTTGGAACCAGCAAATATTCTT
CTCCTATTGGCAAAGCAATCTGGAATTTTTCTAGGAGCTTAAAATACTGTGACATGTAGTTCTTTGGAAAT
CTCCTTTTCTTCGAAAGAAATTTTTCCACATCTCTACGTGAAATAATTCCCTTAGGGTGTTTTGGACAACC
TTCCACTTTCACTGTCAAAATCTGTGCCATGATTTTACAAAGCCACTTGGGTTCCACAAAATACAAGTCAC
TTAACTGCAGTGCTGGGTCTTGAAAATGAAGAAGGACTCCTGATTCATTTAGAAAGTGAACTGCGTGAGGA
AGCTCATTTTCATCTAACTGCAACTGATTTTCTCTCACTAGTTGTAATAATCGTTTCTGGTCAATTACAGG
AAATTCAATTGGCACATTTTTACGCTCCGATAAAATGATTTTCTCAAGTTCTACATAGCAGTCTGGAATCA
GCTGTCCAACAACAGGCTGATCTCGGATCTTGAAATTAAGGCTCTCGTTTATGATGGTTTTCCGAAGTTTT
GCCAAAGCATCAGATTCCTCGGTGGCATTCACAAAGTGGTAATCTCGTATAGCAGGGAACCCTCGCTTATT
CAGGAGTTCCTTGGTGATTTTACCTATGCAGGCTTTGCGCTGCCTCTCATCAGAAACATCCAAATGTGTGC
CAACGAGAATCACAGGGGAAGAAGAAGCGCGAGCCTTTATATTGAAGAGCCAAGGCTTCATGGCATCAACT
TCAGCCTGTCCTTTGCTAAGGTCATAGACAGCAAGGTACAATGCTCGCTGCGTCATAAAATGAGGATGAGT
GCTATAGAATTCCTCACGACCTGCAAAATCCCACACATTCAGAACGAGATCTCTCTTTCTTTTGCCTCTTA
TTTGGATAGGCCAGTCTTTCACATCTATGCCAACTGTGGCACTTTGCATTCCAAGATCTGATTTCTTGGTT
TTCATTAATTGCTGCAACAAGGTGGTTTTACCACTCCCAGTATTTCCAACAACCATAAGTTTCATTCGGTT
ATAGGGCACAGCCTTTTTTAACCGCTGCTGAAGAAACCTTATGATGTCTTTGGCTTTACATCCTATATGTT
TAAAATCAAAGTTAAGACGCAGTTCATCCAAAGGAAGATCCCATATTTTGCTTAATTTCCCCATTTCATTG
GGAAAGGATCTTAGTTCCAAGTTGTAACTGACATCCAGAGATGTCAGATTTTCAAGACAGCCAATCTCAGG
AGGAATCTCTTTCAGTTTATTGTGAGAAAGATGCAGTTTCTCTACTCTAGACCATAAATACGCTTTTTCAC
TCAAGTCCAAGATGCTGATCTGATTATGGCTAAATAAGAGTTCCCTTAAGTTCAAAGATTTCCAGTGTGCA
GGACCTGGTAGATATTGAATATCATTGCTGCTCATATCTAAAGACCGCAAGTGTGGAAGATTTAAAATTGC
TTCTGGAATACATGTAAATTTGTTTTGAGATAATTTTAGGCTTGTCATGGAAGGAGGCAAGAAAGGCATAG
CAGCAAGAAAATTCATTCTGGCACTGAAACTCTCCACTTTAGGACAAGCCTCAAGAAAGTTCTCTGATAGG
GATGAAATGTGGTTTTTACTAAGGTTTAAAATCTTCAGTTCCTTCAGTCTCAAGGGGGAGCATATCCCTGA
TATTTTATTTCCTTCTAAAATGAGCTGCTCCAGTTTCTCTATCCCATCAGCAAGGTTCTCAGGAACAGAAG
ACAGCTGGTTATATGACAGGTTAAACTGTTTCAGAGTTGGACATTTCACTGCAGGATCTAAAACCACTGAG
GGTCCAATGTCATTTCGAGAGACATCAAGGTTAGCAACACAACTCATTTTCAACAAGTAAGAAGGAAATGA
TGTAAATTTATTACTGTGCAAGTCCAAATGTGTCAAACTCTTCAGAGTTTCACATAGCTGTTGTGGAAAGC
TCGTGAGTGCATTCTGGTGAAGCTCCAGCTTTTCAAGATGCTCCAAATGACCACTTATACAGGATTTCTGG
CTTAGGGCATCAATATCTCTTAGTTCATTTGCTGAAAGGTCTAGTGATGTAATATATTCTCTCTCAGAAGC
CAGAGAAGAAATGCTGTCTGAATGCCTCATATGGGATTGAAGTTTTGATGACCTGAGTGAATCATCTGAAG
ATAATATTTTTCTTTTTCTTCTCAGTAAATCTTCATGATCAAAAATGGGCCCCAAGGAACTGGAATGCCTT
TGCAAATTTGGTGAGCAACGTTGTAATACGGCATCTCGGTAAAATTCTCCTACACTAATTGAATTTGATTT
CTTTTTCACAAGAAATGAGCCTTCACTTCCTTCACTATCTAGATCATCACTTTGAGCAAAGACACTGTCCA
TAGAAGAGTCAGGAATAAAGGTCCATTCATCAAATTTAGACAGCACATCTTCAGAAAAATTTCCATCACTG
CCTGAGGCTGCTCCTTCTTCCATGGCACTTTTCATCTGATATCTGATCACCATTCTTGCTAGTGTAGATGC
TATATTTGTTTGTTTCCTTAAATTAGAAGTCTTATCTGGAAATAAAGGACCAAGCCAAGAAGGTTCAACTT
TTCCTATACAAAACCCTCCAAGGCAAATGCTATTGTTGGCCATGTCCAGGGCCAGCCTCCTTAAGAGCAAG
CTGATGATCTGGCTGTCGCCTTTCCCAATGCTTATTGTCAGCGCTTTTCGTACATCTTGTTCACGAGATCC
ACTATTCAATAAGAGTTCCACCAATTTGGGACTGCTCTCTTTCTCACATACCTGACAAATTAAAGAAGTTC
CCTCCTTTGCTTGATTGGCATCTGCTCCTAATAGAAGCAAGCATTCAACCATGATGCTGTTATTCTGATCA
CACGCTCTCTCTAGCATCATATTTTTTAAGTCATCATCCATAGCTACTTTTGCAAAACACTTGCAACAGAG
GTTTAGAAACTGTTGATCCTTTTGTTCCATGATACTGGAAGACATTTGATGGAATATTACTAAGTCAAACG
AATGATGCACCAGCAGCTTAGAAAAAGATGCTGACAATTTGAGGATTGCTAAGATTGTCTGAAATCCTTCA
GTCTGTACTTCAGCAACATCCTTAAATCGGTATAAGCTGGAAGCCAGAATTTTTGCCAGCAGATGTCCAGT
TCCTATGCATAAATTCTTCTTTGTAATCAAGCATCCTATAAGACTTAAACCCAGACACTGAATTTCTTGGT
CATCTGGATACATCTGCAGTGTGTGAAGCACTGAATCCACAGCACCTTCCAGGGATAACACCCCTAATGCA
TCAGTAAAATGTGCAATAAAAGAAATTACTTTTAATCCACATTTCTGAATCCCAGGATTTCCAATGAACCT
GTTCAAAGCTGCTAGGACCAGTTTGTGAATATCATTCTTGAAACACTGTTTTTTAACCATATTTAGCTTAC
GATGAGATTCTGCATCCTCTCTGGATTCTTCTGGCATGCCTGGCACTATAAAATGTAAAATAGCTCGAAGC
GCCTCCAGCTGCACTGGTAATGATGTCTCATGACTTTTCATAACTGTTATTATTTTGGGGAGCACTGCTGC
CATTGTATCCAGGGATGTGTTGCTTCCTTCAAAAAGATGATTTAGCATTTTACAGCCACTTTCAGCCACTT
CAGGAGAATGTATATGCTTCTGCATTAACTCCAAAACATTCAGGTATATTCCTTTTGATAACAGGATTTTT
CTGAAATTAACATTTTGTTCTAAAAGAGTTGACAATGCATTAGCAGATGCCTGGAAAACTTCCTTTGATGA
TGAATGCATCAGCATGGACAGCATCACTTCCCTATGAGCTGGGAAATGGCCATCTTCATCTCCAATCTTCT
CATGTAAACTGTTTTGGTACATAAGGAGATTATTTAGTGCCCAGCATGCAGCCTCCTGCACGTGCTTGTTC
TTTCTATGCCACGTTAACGCTTTGTAACAGGCTTCCAGCCAAAACAATTTAACTTCTTCCCCCTCATCATC
ATTCTCTTGATTCTCATTCTTTTCCTCTAAATCTTGATTTAAGAAAATGGTCTCAGTGAGGAGGGCCAAAC
AGCTGAGCGCTGAGATCTGTAATGCTGCGTTCTCTGGGTACCGCTGCACAGCTTTCACCACAAATTCATGG
ACTTCGTTTAATACCAGGATATTAAAAAAATTACCTAATGTAAGCCTATGGAGCAAACAGCAACTCACTTC
TTGAATTTTTTCACTGATAGGGAATGCTTTCATAGCTTCCACCACAATATTATAACACCTGACATTGCCAC
TCATGAGGACTTCCACATTATTGCAAGGAATTGCTAGGGAATGTAAACAATGCAGTACATGAAGCACAATT
TCCTCTTCATCTTTAAAATTTGTTAACGCACTTAACAATATCATATAATCTTTGTTCTCAACAAATTCAGT
TAGTTGCTCCTCTGAGACTCTTTCAAACAGCACATGTAAAGCTTTGCATCCAAGTTTCTGGATTTCATCAT
TGGCTGGAAATGAGTGCATGGCATCAAAAATTAACATGAAAATATCACTTTCTTCATCCAATATCAGTAAG
GTGATTTTACCTGAAGTTAGGAGGAGATCTAAGGTCTTCAGTCCAATCATTGACAAGTTTACACTGGCATT
ATGAACTGTTAGCATTTTAAGAATCAATTGGTGAACACCAAGGACTTCCCAATCATTTCCAACATCCTGGG
GTCCCATTAAGCTTTGCATTGTACCCGGGCAGATTTCTATTAATTTGCACAGAAGTGACCAACCCACCTGC
TGCACACTCGCGACTCTCATATACGAGTCCAAGACGATCAACAGAGGCACATGGATATTTTTGCCTTGAAA
TAACTTGGAGGCGTGCTCGGAGTACGTGAACACCAGCAGATCCTCCAGGATTTGGACCAGCGTTTCTATCT
GTTTACCTTCCTGGACATTGTTCAGCCTGACTATCAACTTCTTCAGAGTTTCCTCGTCCTCCTCGCACCCC
TGACAGCTGCCACTAGCCATGGTGGCCCCTGCTTCCAACCCGCCGCCCTCCCAGCACGAACGTCCGCTGCT
CAGGGAACCGGCAGGGGCGCCGGCCACAGCTCCCCGGGATCTAGCTCAGCTCACCGCCCTCAGCCAGGGCT
CCCCGGGGGCCCCGTCGGCGCCCACGCCCGCCTGTTTATGAGGAAGGCGGTGGCTCCCCGCCCCGCGTTGC
CCTCCCTCTCCAGAGCCCTCCTGCTCGGCTTCCTCCTCCCCCAGCCAGGCCCCAAAAAACCAGCTCAGGGG
CCTGCCAGAGGCTCCGCCGGGGCGACGGGCCGCGCAGAACTTCGGCGGCGGCCGTGGGGCTGCTGGAGCCG
GGCCTGGCCGGGATGACCGTGCCCGT
SEQ ID NO: 5
>NM_025730.3 Mus musculus leucine-rich repeat kinase 2 (LRRK2), mRNA
GAGCAGCTCTGAGAGCAGGAGCCGTCCCAGCTCGCCGCAGTCCCCGCCGGCTGCACCATGGCCAGTGGCGC
CTGTCAGGGCTGCGAAGAGGAAGAGGAGGAGGAGGCTCTGAAGAAGTTGATAGTCAGGCTGAATAATGTCC
AGGAAGGCAAGCAGATCGAGACGTTGCTTCAGCTCCTGGAGGACATGCTGGTGTTCACCTACTCGGACCGC
GCCTCCAAGTTATTTGAAGATAAAAATTTCCACGTGCCTCTGTTGATTGTCCTGGACTCCTACATGAGAGT
TGCCAGTGTACAGCAGGCGGGGTGGTCACTTCTGTGCAAATTAATAGAAGTCTGTCCAGGGACATTGCAAA
GCTTAATAGGACCCCAGGATATTGGAAATGATTGGGAAGTCCTTGGTATTCACCGGCTGATTCTTAAAATG
TTAACTGTTCATCACGCCAATGTAAACCTGTCAATAGTTGGACTAAAAGCCTTGGATCTCCTCCTAGATTC
AGGTAAACTCACCTTGCTGATACTGGATGAAGAATGTGATATTTTCTTGTTAATTTTTGATGCCATGCACA
GATATTCAGCCAATGATGAAGTCCAAAAACTGGGATGCAAAGCTTTACACGTGCTTTTTGAGAGAGTTTCC
GAGGAACAGCTGACTGAGTTTGTGGAGAACAAAGATTACACGATACTGCTGAGTACGTTCGGCAGCTTCAG
AAGGGACAAGGAGATTGTGTACCACGTACTTTGCTGCTTGCATTCCCTGGCGGTTACATGCAGCAATGTAG
AGGTCCTCATGAGTGGGAATGTCCGGTGCTACAATCTTGTGGTGGAGGCCATGAAAGCCTTCCCCACCAAT
GAAAACATCCAAGAGGTGAGCTGCTCCTTGTTCCAGAAGCTTACATTAGGTAACTTTTTCAACATCCTGGT
GTTGAACGAAGTGCATGTCTTTGTGGTGAAAGCGGTCCGACAGTATCCTGAGAACGCAGCCTTACAGATCT
CTGCACTCAGCTGTTTAGCACTCCTCACTGAGACTATTTTCTTAAACCAAGACTTGGAGGAAAGAAGTGAG
ACTCAAGAGCAGAGCGAAGAGGAAGACAGTGAGAAGCTTTTCTGGCTGGAACCCTGCTATAAAGCCCTGGT
GCGCCATCGAAAGGACAAACACGTGCAGGAGGCTGCCTGCTGGGCACTAAATAACCTCCTTATGTACCAGA
ACAGTTTGCATGAGAAGATCGGAGATGAAGATGGCCAGTTCCCTGCGCACAGGGAAGTGATGCTGTCTATG
CTGATGCACTCTTCTTCCAAAGATGTCTTCCAAGCAGCTGCACATGCTCTGTCCACTCTCTTGGAACAAAA
TGTTAATTTCAGGAAAATCCTGCTGGCAAAAGGAGTATACCTGAATGTCTTGGAATTGATGCAGAAGCATG
CCCATGCGCCTGAGGTGGCAGAGAGTGGCTGCAAGATGCTGAGTCACCTGTTTGAAGGAAGTAACCCTTCT
CTGGATACAATGGCAGCAGTGGTCCCTAAAATACTAACAGTGATGAAAGCCCACGGAACGTCTCTGTCAGT
CCAGCTGGAGGCGCTGCGAGCTATCTTGCATTTCGTTGTGCCAGGACTATTGGAAGAATCCAGGGAGGACT
CTCAATGCAGACCAAATGTGCTCAGAAAACAGTGTTTCAGGACTGACATCCACAAGCTGGTTCTAGTCGCT
CTGAACAGGTTCATTGGGAATCCTGGGATTCAGAAATGTGGATTGAAAGTAATCTCTTCTCTCGCGCACCT
TCCTGATGCCACAGAGACATTGTCCCTGCAAGGAGCAGTTGACTCAGTCCTCCACACCTTACAGATGTATC
CAGATGACCAAGAAATTCAGTGTCTGGGCTTACACCTTATGGGATGCTTGATGACAAAGAAGAATTTCTGC
ATAGGGACAGGGCACCTCCTGGCAAAAATTCTGGCTTCCACTTTGCAGCGCTTTAAAGATGTTGCTGAGGT
GCAGACTACAGGATTACAGACAACCCTGTCAATACTTGAGCTGTCAGTATCTTTCTCCAAGCTGCTAGTGC
ACTATTCCTTTGATGTGGTGATATTTCATCAGATGTCTTCCAGTGTTGTAGAACAAAAGGATGAGCAGTTC
CTCAATCTATGTTGCAAATGCTTTGCAAAAGTGGCCGTGGATGATGAGCTGAAAAACACCATGCTAGAGAG
AGCCTGCGATCAGAATAACAGCATCATGGTTGAATGTTTGCTCCTCTTGGGAGCTGATGCCAACCAAGTGA
AGGGGGCAACTTCTTTAATCTATCAGGTATGTGAGAAAGAGAGCAGTCCTAAATTGGTGGAACTGTTGCTT
AATGGTGGTTGTCGTGAACAAGATGTACGGAAGGCCCTGACCGTAAGCATCCAAAAGGGCGACAGCCAGGT
CATCAGCTTGCTCCTCAGGAAACTTGCCCTGGACCTGGCCAACAACAGCATTTGCCTTGGAGGATTTGGCA
TAGGAAAAATTGATCCTTCTTGGCTTGGTCCTTTATTTCCAGATAAGTCATCCAATTTAAGGAAGCAAACA
AACACAGGATCTGTCCTAGCGAGGAAAGTGCTCCGGTATCAGATGAGAAACACCCTTCAAGAAGGCGTGGC
CTCAGGCAGTGACGGCAAGTTTTCTGAAGACGCGCTGGCGAAATTTGGAGAATGGACCTTTATTCCCGACT
CTTCTATGGACAGTGTGTTTGGCCAGAGCGATGATCTGGATAGCGAAGGCAGCGAGAGCTCATTTCTCGTG
AAGAGGAAGTCCAACTCAATTAGTGTAGGGGAAGTTTACAGAGATCTAGCTCTGCAGCGCTGCTCACCAAA
TGCTCAGAGGCATTCCAATTCGCTGGGTCCTGTTTTTGACCATGAAGACTTACTGAGACGAAAAAGAAAAA
TACTGTCTTCAGATGAGTCTCTCAGGTCCTCAAGGCTGCCGTCCCATATGAGGCAATCAGATAGCTCTTCT
TCCCTGGCTTCTGAGAGAGAACACATCACGTCGTTAGACCTATCTGCCAACGAACTCAAAGATATTGATGC
TCTGAGCCAGAAGTGTTGCCTCAGTAGCCACCTGGAACATCTCACCAAACTGGAACTTCACCAGAATTCAC
TCACGAGCTTCCCACAGCAGCTGTGTGAGACTCTGAAGTGTTTGATACACTTGGATTTGCACAGTAACAAA
TTCACCTCATTTCCCTCTTTCGTGTTGAAAATGCCACGTATCACCAACCTAGATGCCTCTCGAAATGACAT
CGGGCCAACAGTAGTTTTAGACCCTGCGATGAAGTGTCCAAGCCTCAAACAGTTGAATCTGTCCTATAACC
AGCTCTCTTCAATCCCAGAGAATCTTGCCCAAGTGGTGGAGAAACTTGAGCAGCTCCTACTGGAAGGAAAT
AAAATATCCGGGATTTGCTCTCCCCTGAGCCTGAAGGAACTGAAGATTTTAAATCTTAGTAAAAATCACAT
TCCATCCCTACCTGGAGATTTTCTTGAGGCTTGTTCAAAAGTCGAGAGTTTCAGTGCTCGCATGAATTTTC
TTGCTGCAATGCCTGCCTTACCTTCTTCCATAACGAGCTTAAAATTGTCTCAGAACTCTTTCACGTGCATT
CCAGAAGCGATTTTCAGTCTTCCGCACTTGCGGTCCTTGGATATGAGCCACAACAACATTGAATGTCTGCC
GGGACCTGCACATTGGAAGTCTCTGAACTTAAGGGAACTCATTTTTAGCAAGAATCAGATCAGCACCTTAG
ACTTTAGTGAGAACCCACACGTGTGGTCAAGAGTAGAGAAACTGCATCTCTCTCATAATAAACTGAAAGAG
ATTCCTCCAGAAATTGGCTGCCTTGAAAATCTGACGTCTCTCGACGTCAGTTACAACTTGGAACTGAGGTC
CTTCCCAAATGAAATGGGGAAGTTGAGCAAGATATGGGATCTTCCCTTGGACGGACTGCATCTGAATTTTG
ACTTTAAGCACGTAGGATGCAAGGCCAAAGACATCATAAGGTTTCTACAACAACGTCTGAAAAAGGCTGTA
CCCTACAACCGAATGAAGCTCATGATTGTGGGAAATACGGGGAGCGGTAAGACCACTTTACTGCAACAACT
CATGAAAATGAAGAAACCAGAACTTGGCATGCAGGGTGCCACAGTCGGCATAGACGTGCGAGACTGGTCCA
TCCAAATACGGGGCAAAAGGAGAAAGGACCTGGTTCTAAACGTGTGGGATTTTGCAGGTCGTGAGGAATTC
TACAGCACTCACCCCCACTTCATGACCCAGAGAGCCCTCTACCTGGCTGTCTATGATCTCAGCAAGGGGCA
GGCAGAGGTGGACGCCATGAAGCCCTGGCTCTTCAATATCAAGGCTCGTGCCTCTTCTTCCCCGGTGATTC
TGGTGGGCACACATTTGGATGTTTCTGATGAGAAGCAGCGGAAAGCGTGCATAAGCAAAATCACGAAGGAA
CTCCTAAATAAGCGAGGATTCCCCACCATCCGGGACTACCACTTTGTGAATGCCACCGAGGAGTCAGATGC
GCTGGCAAAGCTTCGGAAAACCATCATAAATGAGAGCCTTAATTTCAAGATCCGAGATCAGCCTGTGGTTG
GGCAGCTAATTCCAGATTGCTACGTAGAACTGGAGAAAATCATTTTATCAGAGCGGAAAGCTGTGCCGACT
GAGTTTCCTGTGATTAACCGGAAACACCTGTTACAGCTCGTGAACGAACATCAGCTGCAGCTGGATGAGAA
CGAGCTCCCACACGCCGTTCACTTCCTAAATGAGTCGGGAGTTCTTCTGCATTTTCAAGACCCTGCCCTGC
AGCTAAGTGACCTGTACTTTGTGGAACCCAAGTGGCTTTGTAAAGTCATGGCACAGATCTTGACAGTGAAG
GTAGACGGCTGTCTGAAACATCCTAAGGGCATCATTTCCCGGAGAGATGTGGAAAAATTCCTTTCAAAGAA
GAAGCGATTCCCGAAGAACTATATGATGCAATACTTTAAACTATTAGAAAAATTTCAGATCGCATTGCCAA
TAGGGGAAGAATATCTTCTGGTTCCAAGCAGCTTGTCTGACCACAGGCCAGTGATAGAGCTCCCCCACTGT
GAGAACTCTGAGATCATCATCCGGCTGTACGAAATGCCGTACTTTCCCATGGGATTTTGGTCAAGATTGAT
TAACCGATTACTTGAAATCTCACCCTTCATGCTTTCTGGCAGAGAGAGAGCACTACGCCCTAACAGGATGT
ATTGGCGGCAAGGCATCTACTTGAATTGGTCTCCAGAAGCATACTGTCTGGTAGGCTCTGAAGTCTTAGAC
AATCGACCTGAGAGTTTCTTGAAAATCACAGTTCCGTCTTGTAGAAAAGGTTGTATTCTTCTGGGCCGAGT
TGTGGATCATATTGACTCACTCATGGAAGAATGGTTTCCCGGGTTACTGGAGATTGACATTTGTGGGGAAG
GAGAAACTCTGTTGAAGAAATGGGCATTGTACAGTTTTAATGATGGTGAAGAACATCAGAAGATCTTGCTT
GATGAGTTGATGAAGAAGGCTGAAGAAGGAGACCTGTTAATAAATCCAGACCAACCAAGGCTCACTATTCC
AATATCCCAGATTGCTCCGGACTTGATCTTGGCTGACCTGCCTAGAAATATCATGTTGAACAATGATGAGT
TGGAATTTGAGGAAGCACCAGAGTTTCTCTTAGGCGATGGAAGTTTTGGATCCGTTTATCGAGCTGCCTAC
GAAGGAGAGGAAGTGGCTGTGAAGATTTTTAATAAGCACACATCTCTTAGGCTGTTAAGACAAGAGTTGGT
GGTCCTTTGTCACCTTCACCACCCCAGCCTGATATCCTTGCTGGCGGCTGGTATTCGTCCTCGGATGTTGG
TAATGGAGTTGGCCTCCAAAGGTTCCTTGGATCGCCTGCTGCAGCAGGACAAAGCCAGCCTCACCAGAACC
CTCCAGCACAGGATCGCGTTGCATGTGGCCGACGGCCTGAGGTATCTCCACTCAGCCATGATTATTTACCG
TGACCTGAAGCCCCACAATGTGCTGCTTTTTACCCTGTATCCCAATGCTGCCATCATTGCGAAGATTGCGG
ACTACGGGATCGCACAGTACTGCTGCAGGATGGGAATAAAGACATCAGAGGGCACCCCAGGGTTCCGGGCA
CCTGAAGTTGCCAGGGGGAATGTCATTTATAACCAACAGGCCGATGTTTATTCTTTTGGCTTACTACTTCA
CGATATTTGGACAACTGGGAGTAGGATTATGGAGGGTTTGAGGTTCCCAAATGAGTTTGATGAGTTAGCCA
TACAAGGGAAGTTGCCAGATCCAGTTAAAGAATATGGCTGTGCCCCATGGCCTATGGTTGAGAAGTTAATT
ACAAAGTGTTTGAAAGAAAATCCTCAAGAAAGACCCACTTCTGCCCAGGTCTTTGACATTTTGAATTCGGC
TGAATTAATTTGCCTCATGCGACACATTTTAATACCTAAGAACATCATTGTTGAATGCATGGTTGCCACGA
ATCTCAATAGCAAGAGTGCGACTCTCTGGTTGGGATGTGGGAACACAGAAAAAGGACAGCTTTCCTTATTT
GACTTAAACACGGAAAGATACAGCTATGAGGAAGTTGCTGATAGTAGAATACTGTGCTTGGCTTTGGTGCA
TCTCGCTGCTGAGAAAGAGAGCTGGGTTGTGTGCGGGACACAGTCTGGGGCTCTCCTGGTCATCAATGTTG
AAGAGGAGACAAAGAGACACACCCTGGAAAAGATGACTGATTCTGTCACTTGTTTGCATTGCAATTCCCTT
GCCAAGCAGAGCAAGCAAAGTAACTTTCTTTTGGTGGGAACTGCTGATGGTAACTTAATGATATTTGAAGA
TAAAGCCGTTAAGTGTAAAGGAGCTGCCCCCTTGAAGACACTACACATAGGCGATGTCAGTACGCCCCTGA
TGTGCCTGAGCGAGTCCCTGAATTCATCTGAAAGACACATCACATGGGGAGGGTGTGGCACAAAGGTCTTC
TCCTTTTCCAATGATTTCACCATTCAGAAACTCATCGAGACAAAAACCAACCAGCTGTTTTCTTACGCAGC
TTTCAGCGATTCTAACATCATAGCGCTGGCAGTAGACACAGCCCTGTATATTGCCAAGAAAAACAGCCCTG
TCGTAGAGGTGTGGGACAAGAAAACAGAAAAGCTCTGTGAATTAATAGACTGTGTGCACTTCTTAAAGGAG
GTGATGGTAAAACTAAACAAGGAATCGAAACATCAGCTGTCCTACTCTGGGAGGGTGAAGGCCCTCTGCCT
GCAGAAGAACACGGCTCTCTGGATCGGAACTGGAGGAGGCCACATCTTACTCCTGGATCTTTCTACTCGGC
GAGTTATCCGCACCATTCACAATTTCTGTGATTCTGTGAGAGCCATGGCCACAGCACAATTAGGAAGCCTT
AAGAATGTCATGCTGGTTTTGGGGTACAAGCGGAAGAGTACAGAGGGTATCCAAGAACAAAAAGAGATACA
ATCTTGTTTGTCTATTTGGGACCTCAATCTTCCACACGAGGTGCAAAATTTAGAAAAACACATTGAAGTAA
GAACAGAATTAGCTGATAAAATGAGGAAAACATCTGTTGAATAGAAAGACATCAGGCAGTCTCGATGTTAT
ATTGAATAAGACATCAGACATCCTCGTCACTATATTGAAAAGGACATCAGACATCCTCGCCAATATGTTAG
AAAATGTACTCTTCTTTTTAAAATATATTTTTAAAATGTTTACATTGAAAAGAGTATGCCTATTCTTTACA
AAGTTCATATGTATATGAAGGAATGTGTATGTCTTATGTTTAATTTAATATATGTAAAAATATTTATCAGT
AAATATGTTTTAAAAAACTATTTAATTTAGCATTATATTTTCTATACTCCTTAACTAATTTGAAGGGATAA
ACAAAAGAAATCTACAAAGCATTTAATTTCAGTATTTATACTAAAATTAATAAAAATATCATGTTTGTTTT
GCTATGTATTGTGATGATAAAGCCTATTTTAAATTGTTGATTAAGACACAGATGTTGCTTGATTATCTATG
GACTCAGCGGAGTAGAATAAAATATCTGGTCAATTTCCAAGTAAGAGACTCTTTCATATCTTGTTTTCAAG
TGAATTATCATCATTAATGTAAACTGTCATATTTTCACTAATAAAGATTTTTGTTAGCTCAGGAAA
SEQ ID NO: 6
>Reverse Complement of SEQ ID NO: 5
TTTCCTGAGCTAACAAAAATCTTTATTAGTGAAAATATGACAGTTTACATTAATGATGATAATTCACTTGA
AAACAAGATATGAAAGAGTCTCTTACTTGGAAATTGACCAGATATTTTATTCTACTCCGCTGAGTCCATAG
ATAATCAAGCAACATCTGTGTCTTAATCAACAATTTAAAATAGGCTTTATCATCACAATACATAGCAAAAC
AAACATGATATTTTTATTAATTTTAGTATAAATACTGAAATTAAATGCTTTGTAGATTTCTTTTGTTTATC
CCTTCAAATTAGTTAAGGAGTATAGAAAATATAATGCTAAATTAAATAGTTTTTTAAAACATATTTACTGA
TAAATATTTTTACATATATTAAATTAAACATAAGACATACACATTCCTTCATATACATATGAACTTTGTAA
AGAATAGGCATACTCTTTTCAATGTAAACATTTTAAAAATATATTTTAAAAAGAAGAGTACATTTTCTAAC
ATATTGGCGAGGATGTCTGATGTCCTTTTCAATATAGTGACGAGGATGTCTGATGTCTTATTCAATATAAC
ATCGAGACTGCCTGATGTCTTTCTATTCAACAGATGTTTTCCTCATTTTATCAGCTAATTCTGTTCTTACT
TCAATGTGTTTTTCTAAATTTTGCACCTCGTGTGGAAGATTGAGGTCCCAAATAGACAAACAAGATTGTAT
CTCTTTTTGTTCTTGGATACCCTCTGTACTCTTCCGCTTGTACCCCAAAACCAGCATGACATTCTTAAGGC
TTCCTAATTGTGCTGTGGCCATGGCTCTCACAGAATCACAGAAATTGTGAATGGTGCGGATAACTCGCCGA
GTAGAAAGATCCAGGAGTAAGATGTGGCCTCCTCCAGTTCCGATCCAGAGAGCCGTGTTCTTCTGCAGGCA
GAGGGCCTTCACCCTCCCAGAGTAGGACAGCTGATGTTTCGATTCCTTGTTTAGTTTTACCATCACCTCCT
TTAAGAAGTGCACACAGTCTATTAATTCACAGAGCTTTTCTGTTTTCTTGTCCCACACCTCTACGACAGGG
CTGTTTTTCTTGGCAATATACAGGGCTGTGTCTACTGCCAGCGCTATGATGTTAGAATCGCTGAAAGCTGC
GTAAGAAAACAGCTGGTTGGTTTTTGTCTCGATGAGTTTCTGAATGGTGAAATCATTGGAAAAGGAGAAGA
CCTTTGTGCCACACCCTCCCCATGTGATGTGTCTTTCAGATGAATTCAGGGACTCGCTCAGGCACATCAGG
GGCGTACTGACATCGCCTATGTGTAGTGTCTTCAAGGGGGCAGCTCCTTTACACTTAACGGCTTTATCTTC
AAATATCATTAAGTTACCATCAGCAGTTCCCACCAAAAGAAAGTTACTTTGCTTGCTCTGCTTGGCAAGGG
AATTGCAATGCAAACAAGTGACAGAATCAGTCATCTTTTCCAGGGTGTGTCTCTTTGTCTCCTCTTCAACA
TTGATGACCAGGAGAGCCCCAGACTGTGTCCCGCACACAACCCAGCTCTCTTTCTCAGCAGCGAGATGCAC
CAAAGCCAAGCACAGTATTCTACTATCAGCAACTTCCTCATAGCTGTATCTTTCCGTGTTTAAGTCAAATA
AGGAAAGCTGTCCTTTTTCTGTGTTCCCACATCCCAACCAGAGAGTCGCACTCTTGCTATTGAGATTCGTG
GCAACCATGCATTCAACAATGATGTTCTTAGGTATTAAAATGTGTCGCATGAGGCAAATTAATTCAGCCGA
ATTCAAAATGTCAAAGACCTGGGCAGAAGTGGGTCTTTCTTGAGGATTTTCTTTCAAACACTTTGTAATTA
ACTTCTCAACCATAGGCCATGGGGCACAGCCATATTCTTTAACTGGATCTGGCAACTTCCCTTGTATGGCT
AACTCATCAAACTCATTTGGGAACCTCAAACCCTCCATAATCCTACTCCCAGTTGTCCAAATATCGTGAAG
TAGTAAGCCAAAAGAATAAACATCGGCCTGTTGGTTATAAATGACATTCCCCCTGGCAACTTCAGGTGCCC
GGAACCCTGGGGTGCCCTCTGATGTCTTTATTCCCATCCTGCAGCAGTACTGTGCGATCCCGTAGTCCGCA
ATCTTCGCAATGATGGCAGCATTGGGATACAGGGTAAAAAGCAGCACATTGTGGGGCTTCAGGTCACGGTA
AATAATCATGGCTGAGTGGAGATACCTCAGGCCGTCGGCCACATGCAACGCGATCCTGTGCTGGAGGGTTC
TGGTGAGGCTGGCTTTGTCCTGCTGCAGCAGGCGATCCAAGGAACCTTTGGAGGCCAACTCCATTACCAAC
ATCCGAGGACGAATACCAGCCGCCAGCAAGGATATCAGGCTGGGGTGGTGAAGGTGACAAAGGACCACCAA
CTCTTGTCTTAACAGCCTAAGAGATGTGTGCTTATTAAAAATCTTCACAGCCACTTCCTCTCCTTCGTAGG
CAGCTCGATAAACGGATCCAAAACTTCCATCGCCTAAGAGAAACTCTGGTGCTTCCTCAAATTCCAACTCA
TCATTGTTCAACATGATATTTCTAGGCAGGTCAGCCAAGATCAAGTCCGGAGCAATCTGGGATATTGGAAT
AGTGAGCCTTGGTTGGTCTGGATTTATTAACAGGTCTCCTTCTTCAGCCTTCTTCATCAACTCATCAAGCA
AGATCTTCTGATGTTCTTCACCATCATTAAAACTGTACAATGCCCATTTCTTCAACAGAGTTTCTCCTTCC
CCACAAATGTCAATCTCCAGTAACCCGGGAAACCATTCTTCCATGAGTGAGTCAATATGATCCACAACTCG
GCCCAGAAGAATACAACCTTTTCTACAAGACGGAACTGTGATTTTCAAGAAACTCTCAGGTCGATTGTCTA
AGACTTCAGAGCCTACCAGACAGTATGCTTCTGGAGACCAATTCAAGTAGATGCCTTGCCGCCAATACATC
CTGTTAGGGCGTAGTGCTCTCTCTCTGCCAGAAAGCATGAAGGGTGAGATTTCAAGTAATCGGTTAATCAA
TCTTGACCAAAATCCCATGGGAAAGTACGGCATTTCGTACAGCCGGATGATGATCTCAGAGTTCTCACAGT
GGGGGAGCTCTATCACTGGCCTGTGGTCAGACAAGCTGCTTGGAACCAGAAGATATTCTTCCCCTATTGGC
AATGCGATCTGAAATTTTTCTAATAGTTTAAAGTATTGCATCATATAGTTCTTCGGGAATCGCTTCTTCTT
TGAAAGGAATTTTTCCACATCTCTCCGGGAAATGATGCCCTTAGGATGTTTCAGACAGCCGTCTACCTTCA
CTGTCAAGATCTGTGCCATGACTTTACAAAGCCACTTGGGTTCCACAAAGTACAGGTCACTTAGCTGCAGG
GCAGGGTCTTGAAAATGCAGAAGAACTCCCGACTCATTTAGGAAGTGAACGGCGTGTGGGAGCTCGTTCTC
ATCCAGCTGCAGCTGATGTTCGTTCACGAGCTGTAACAGGTGTTTCCGGTTAATCACAGGAAACTCAGTCG
GCACAGCTTTCCGCTCTGATAAAATGATTTTCTCCAGTTCTACGTAGCAATCTGGAATTAGCTGCCCAACC
ACAGGCTGATCTCGGATCTTGAAATTAAGGCTCTCATTTATGATGGTTTTCCGAAGCTTTGCCAGCGCATC
TGACTCCTCGGTGGCATTCACAAAGTGGTAGTCCCGGATGGTGGGGAATCCTCGCTTATTTAGGAGTTCCT
TCGTGATTTTGCTTATGCACGCTTTCCGCTGCTTCTCATCAGAAACATCCAAATGTGTGCCCACCAGAATC
ACCGGGGAAGAAGAGGCACGAGCCTTGATATTGAAGAGCCAGGGCTTCATGGCGTCCACCTCTGCCTGCCC
CTTGCTGAGATCATAGACAGCCAGGTAGAGGGCTCTCTGGGTCATGAAGTGGGGGTGAGTGCTGTAGAATT
CCTCACGACCTGCAAAATCCCACACGTTTAGAACCAGGTCCTTTCTCCTTTTGCCCCGTATTTGGATGGAC
CAGTCTCGCACGTCTATGCCGACTGTGGCACCCTGCATGCCAAGTTCTGGTTTCTTCATTTTCATGAGTTG
TTGCAGTAAAGTGGTCTTACCGCTCCCCGTATTTCCCACAATCATGAGCTTCATTCGGTTGTAGGGTACAG
CCTTTTTCAGACGTTGTTGTAGAAACCTTATGATGTCTTTGGCCTTGCATCCTACGTGCTTAAAGTCAAAA
TTCAGATGCAGTCCGTCCAAGGGAAGATCCCATATCTTGCTCAACTTCCCCATTTCATTTGGGAAGGACCT
CAGTTCCAAGTTGTAACTGACGTCGAGAGACGTCAGATTTTCAAGGCAGCCAATTTCTGGAGGAATCTCTT
TCAGTTTATTATGAGAGAGATGCAGTTTCTCTACTCTTGACCACACGTGTGGGTTCTCACTAAAGTCTAAG
GTGCTGATCTGATTCTTGCTAAAAATGAGTTCCCTTAAGTTCAGAGACTTCCAATGTGCAGGTCCCGGCAG
ACATTCAATGTTGTTGTGGCTCATATCCAAGGACCGCAAGTGCGGAAGACTGAAAATCGCTTCTGGAATGC
ACGTGAAAGAGTTCTGAGACAATTTTAAGCTCGTTATGGAAGAAGGTAAGGCAGGCATTGCAGCAAGAAAA
TTCATGCGAGCACTGAAACTCTCGACTTTTGAACAAGCCTCAAGAAAATCTCCAGGTAGGGATGGAATGTG
ATTTTTACTAAGATTTAAAATCTTCAGTTCCTTCAGGCTCAGGGGAGAGCAAATCCCGGATATTTTATTTC
CTTCCAGTAGGAGCTGCTCAAGTTTCTCCACCACTTGGGCAAGATTCTCTGGGATTGAAGAGAGCTGGTTA
TAGGACAGATTCAACTGTTTGAGGCTTGGACACTTCATCGCAGGGTCTAAAACTACTGTTGGCCCGATGTC
ATTTCGAGAGGCATCTAGGTTGGTGATACGTGGCATTTTCAACACGAAAGAGGGAAATGAGGTGAATTTGT
TACTGTGCAAATCCAAGTGTATCAAACACTTCAGAGTCTCACACAGCTGCTGTGGGAAGCTCGTGAGTGAA
TTCTGGTGAAGTTCCAGTTTGGTGAGATGTTCCAGGTGGCTACTGAGGCAACACTTCTGGCTCAGAGCATC
AATATCTTTGAGTTCGTTGGCAGATAGGTCTAACGACGTGATGTGTTCTCTCTCAGAAGCCAGGGAAGAAG
AGCTATCTGATTGCCTCATATGGGACGGCAGCCTTGAGGACCTGAGAGACTCATCTGAAGACAGTATTTTT
CTTTTTCGTCTCAGTAAGTCTTCATGGTCAAAAACAGGACCCAGCGAATTGGAATGCCTCTGAGCATTTGG
TGAGCAGCGCTGCAGAGCTAGATCTCTGTAAACTTCCCCTACACTAATTGAGTTGGACTTCCTCTTCACGA
GAAATGAGCTCTCGCTGCCTTCGCTATCCAGATCATCGCTCTGGCCAAACACACTGTCCATAGAAGAGTCG
GGAATAAAGGTCCATTCTCCAAATTTCGCCAGCGCGTCTTCAGAAAACTTGCCGTCACTGCCTGAGGCCAC
GCCTTCTTGAAGGGTGTTTCTCATCTGATACCGGAGCACTTTCCTCGCTAGGACAGATCCTGTGTTTGTTT
GCTTCCTTAAATTGGATGACTTATCTGGAAATAAAGGACCAAGCCAAGAAGGATCAATTTTTCCTATGCCA
AATCCTCCAAGGCAAATGCTGTTGTTGGCCAGGTCCAGGGCAAGTTTCCTGAGGAGCAAGCTGATGACCTG
GCTGTCGCCCTTTTGGATGCTTACGGTCAGGGCCTTCCGTACATCTTGTTCACGACAACCACCATTAAGCA
ACAGTTCCACCAATTTAGGACTGCTCTCTTTCTCACATACCTGATAGATTAAAGAAGTTGCCCCCTTCACT
TGGTTGGCATCAGCTCCCAAGAGGAGCAAACATTCAACCATGATGCTGTTATTCTGATCGCAGGCTCTCTC
TAGCATGGTGTTTTTCAGCTCATCATCCACGGCCACTTTTGCAAAGCATTTGCAACATAGATTGAGGAACT
GCTCATCCTTTTGTTCTACAACACTGGAAGACATCTGATGAAATATCACCACATCAAAGGAATAGTGCACT
AGCAGCTTGGAGAAAGATACTGACAGCTCAAGTATTGACAGGGTTGTCTGTAATCCTGTAGTCTGCACCTC
AGCAACATCTTTAAAGCGCTGCAAAGTGGAAGCCAGAATTTTTGCCAGGAGGTGCCCTGTCCCTATGCAGA
AATTCTTCTTTGTCATCAAGCATCCCATAAGGTGTAAGCCCAGACACTGAATTTCTTGGTCATCTGGATAC
ATCTGTAAGGTGTGGAGGACTGAGTCAACTGCTCCTTGCAGGGACAATGTCTCTGTGGCATCAGGAAGGTG
CGCGAGAGAAGAGATTACTTTCAATCCACATTTCTGAATCCCAGGATTCCCAATGAACCTGTTCAGAGCGA
CTAGAACCAGCTTGTGGATGTCAGTCCTGAAACACTGTTTTCTGAGCACATTTGGTCTGCATTGAGAGTCC
TCCCTGGATTCTTCCAATAGTCCTGGCACAACGAAATGCAAGATAGCTCGCAGCGCCTCCAGCTGGACTGA
CAGAGACGTTCCGTGGGCTTTCATCACTGTTAGTATTTTAGGGACCACTGCTGCCATTGTATCCAGAGAAG
GGTTACTTCCTTCAAACAGGTGACTCAGCATCTTGCAGCCACTCTCTGCCACCTCAGGCGCATGGGCATGC
TTCTGCATCAATTCCAAGACATTCAGGTATACTCCTTTTGCCAGCAGGATTTTCCTGAAATTAACATTTTG
TTCCAAGAGAGTGGACAGAGCATGTGCAGCTGCTTGGAAGACATCTTTGGAAGAAGAGTGCATCAGCATAG
ACAGCATCACTTCCCTGTGCGCAGGGAACTGGCCATCTTCATCTCCGATCTTCTCATGCAAACTGTTCTGG
TACATAAGGAGGTTATTTAGTGCCCAGCAGGCAGCCTCCTGCACGTGTTTGTCCTTTCGATGGCGCACCAG
GGCTTTATAGCAGGGTTCCAGCCAGAAAAGCTTCTCACTGTCTTCCTCTTCGCTCTGCTCTTGAGTCTCAC
TTCTTTCCTCCAAGTCTTGGTTTAAGAAAATAGTCTCAGTGAGGAGTGCTAAACAGCTGAGTGCAGAGATC
TGTAAGGCTGCGTTCTCAGGATACTGTCGGACCGCTTTCACCACAAAGACATGCACTTCGTTCAACACCAG
GATGTTGAAAAAGTTACCTAATGTAAGCTTCTGGAACAAGGAGCAGCTCACCTCTTGGATGTTTTCATTGG
TGGGGAAGGCTTTCATGGCCTCCACCACAAGATTGTAGCACCGGACATTCCCACTCATGAGGACCTCTACA
TTGCTGCATGTAACCGCCAGGGAATGCAAGCAGCAAAGTACGTGGTACACAATCTCCTTGTCCCTTCTGAA
GCTGCCGAACGTACTCAGCAGTATCGTGTAATCTTTGTTCTCCACAAACTCAGTCAGCTGTTCCTCGGAAA
CTCTCTCAAAAAGCACGTGTAAAGCTTTGCATCCCAGTTTTTGGACTTCATCATTGGCTGAATATCTGTGC
ATGGCATCAAAAATTAACAAGAAAATATCACATTCTTCATCCAGTATCAGCAAGGTGAGTTTACCTGAATC
TAGGAGGAGATCCAAGGCTTTTAGTCCAACTATTGACAGGTTTACATTGGCGTGATGAACAGTTAACATTT
TAAGAATCAGCCGGTGAATACCAAGGACTTCCCAATCATTTCCAATATCCTGGGGTCCTATTAAGCTTTGC
AATGTCCCTGGACAGACTTCTATTAATTTGCACAGAAGTGACCACCCCGCCTGCTGTACACTGGCAACTCT
CATGTAGGAGTCCAGGACAATCAACAGAGGCACGTGGAAATTTTTATCTTCAAATAACTTGGAGGCGCGGT
CCGAGTAGGTGAACACCAGCATGTCCTCCAGGAGCTGAAGCAACGTCTCGATCTGCTTGCCTTCCTGGACA
TTATTCAGCCTGACTATCAACTTCTTCAGAGCCTCCTCCTCCTCTTCCTCTTCGCAGCCCTGACAGGCGCC
ACTGGCCATGGTGCAGCCGGCGGGGACTGCGGCGAGCTGGGACGGCTCCTGCTCTCAGAGCTGCTC
SEQ ID NO: 7
>NM_001191789.1 Rattus norvegicus leucine-rich repeat kinase 2 (LRRK2),
mRNA
ATGGCCAGTGGCGCCTGTCAGGGCTGCGACGAGGAAGAGGAGGAGGAGGCTCTGAAGAAGTTGATAGTCAG
GCTGAATAATGTCCAGGAAGGCAAGCAGATCGAGACGTTGCTCCAGCTCCTGGAGGACATTCTGGTGTTCA
CCTACTCCGACCGCGCCTCCAAGTTATTTGAAGGCAAAAATGTCCACGTGCCTCTGTTGATAGTCCTGGAC
TCCTACATGAGAGTCGCCAGTGTGCAGCAGGTGGGGTGGTCACTTCTGTGCAAATTAATAGAAGTCTGTCC
AGGGACATTGCAAAGCTTAATAGGACCCCAGGATATTGGGAATGATTGGGAAGTCCTTGGTATTCACCGAC
TGATTCTTAAAATGTTAACTGTTCATCATGCCAACGTAAACCTGTCAATAGTTGGACTAAAAGCCTTAGAT
CTCCTCCTAGATTCAGGTAAAATTACTCTGCTGATACTGGATGAAGAATGTGATGTTTTCCTGTTAATTTT
TGATGCCATGCACAGATATTCAGCCAACGAGGAAGTCCAGAAGCTTGCGTGCAAGGCTTTACATGTGCTGT
TCGAGAGAGTGTCCGAGGAGCAACTGACTGAGTTTGTGGAGAACAAAGATTACATGACCCTGCTGAGTACG
TTCCGCAGCTTCAAGAGGGACGAGGAGATTGTGCACCATGTACTCTGCTGCCTGCATTCTCTGGCCGTCAC
TTGCAGCAATGTGGAGGTCCTCATGAGTGGGAATGTCAGGTGTTACAATATTGTGGTGGAAGCCATGAAAA
CATTCCCCACCAGTGAAAACATTCAAGAGGTGAGCTGCTCCTTGCTCCACAAGCTTACATTAGGTAATTTT
TTCAACATCCTGGTGTTGAACGAAGTCCATGTCTTTGTGGTGAAAGCCGTCCAGCGGTATCCCGAGAACGT
AGCCTTACAGATCTCTGCACTCAGCTGCTTAGCCCTCCTCACCGAGACTATTTTCTTAAACCAAGACCTGG
AAGAAAGAAGTGAGACTCAGGAAAACAGCGATGAGGACAGTGAGAAGCCTTTCTGGTTGGAACCCTGCTAT
AAAGCCCTGATGCGCCATCGAAAGAACAAACACGTGCAGGAGGCCGCCTGCTGGGCCCTAAATAATCTCCT
CATGTACCAGAGCAGTTTGCACGAGAAGATTGGAGATGAAGATGGCCAGTTCCCGGCGCACAGGGAAGTGA
TGCTGTCTATGCTGATGCACTCTTCTTCCAAAGACGTCTTCCAAGCAGCTGCGCATGCTCTGTCCACTCTC
TTGGAACAAAACGTTAATTTCAGGAAAATCCTGCTTGCAAAAGGAGTGTACCTGAATGTCTTGGAGTTGAT
GCAGCGGCACGCCCAGGTTCCTGAGGTGGCAGAGAGTGGCTGCAAGATGCTGAGTCATCTGTTTGAAGGAA
GCAACCCTTCTTTGGATACAGTGGCGGCAGTGATCCCCAAAATACTAACAGTGATGAGAACCCATGGAACG
TCTCTGTCAGTCCAGCTGGAGGCACTGCGAGCTCTTCTGCATTTTGTGGTGCCGGGAGTATCAGAAGATTC
CAGGGATGACTCGCGATGCCAACCAAACGTGCTCAGAACACAGTGCTTCAGGACTGACATCCACAAGCTGG
TTCTAGCCGCTCTGAACAGGTTCATTGGGAATCCCGGGATTCAGAAATGTGGATTGAAAGTCATCTCTTCT
TTCGCACATCTTCCCGATGCCTTAGAGATGTTATCCCTGCATGGAGCAGTTGACTCAGTCCTCCATACCTT
ACAGATGTATCCAGATGACCAAGAAATTCAGTGTCTGGGCTTACACCTTATGGGATGCCTGATGACAAAGA
AGAATTTCTGCATAGGGACAGGGCACCTCCTGGCAAAAATTCTGGCTTCCACCTTGCAGCGATTTAAAGAT
GTTGCTGAAGTACAGACTACAGGATTACAGACGGTCTTGTCAATGCTTGACCTGTCCGTATCTTTCTCCAA
GCTGCTAGTGCACTATTCATTTGATGTGGTGATGTTTCATCAGATGTCTTCCGGTGTCCTGGAACAAAAGG
ATGAGCAGTTTCTCAACTTATGCTGCAAATGCTTTGCAAAAGTGGCTGTGGATGATGAGCTGAAAAGCAAG
ATGCTAGAGAGAGCCTGCGATCAGAACAACAGCATCATGGTCGAATGTTTGCTCCTCTTGGGAGCCGATGC
CAATCAAGCGAAGGGGGCAACTTCTTTAATCTATCAGGTATGTGAGAAAGAGAGCAGCCCTAAATTGGTGG
AACTATTGCTTAACAGTGGGTGCCGTGAACAAGATGTACGGAAAGCCCTGACAGTAAGCATCCAAAAGGGC
GACAACCAGGTCATCAGCTTACTCCTGAGGAGACTTGCCCTGGACCTGGCCAACAACAGCATTTGCCTTGG
AGGATTTTGCATAGGAAAACTTGATCCTTCTTGGCTAGGCCCTTTATTTCCAGATAAGTCATCTAATTTGA
GGAAACAAACAAATGCGGGGTCTGTCCTAGCGAGGAAAGTGCTCCGGTATCAGATGAGAAACACTCTTCAA
GAAGGCGTGGCCTCAGGCAGTGAGGGCAACTTCTCTGAGGATGCGCTGGCGAAATTTGGCGAATGGACCTT
CATTCCCGACTCTTCTATGGACAGTGTGTTTGGCCAGAGTGACGATCTGGATAGCGAAGGCAGCGAGAGCT
CCTTTCTGGTGAAGAAGAAGTCCAACTCAGTTAGTGTAGGAGAAGTTTACAGGGACCTAGCTCTGCAGCGC
TGCTCACCAAATGCTCAGAGGCACTCCAGTTCCTTGGGTCCTGTTTTTGATCACGAAGATCTACTGAGACG
AAAAAGAAAAATACTGTCCTCAGATGAGTCTCTCAGATCCTCAAGGCTGCAGTCCCATACGAGACAATCAG
ATAGCTCTTCTTCTCTGGCTTCTGAGAGAGAACACATCACGTCTTTAGACCTTTCTGCCAACGAACTGAAA
GATATTGATGCTCTGGGCCAGAAGTGTTGCCTCAGTAGCCACCTGGAGCATCTCACCAAGCTGGAACTTCA
CCAGAATTCACTCACGAGCTTCCCACAACAGCTGTGTGAGACTCTGAAGTGCTTGACACATCTGGATTTGC
ACAGTAACAAATTCGCCACCTTTCCCTCCTTCATGTTGAAAATGCCAAGTGTTATCCACCTAGACGCCTCT
CGAAATGACATCGGACCAACAGTTGTTTTAGACCCTGTGGTGAAGTGTCCAAGCCTCAAACAGTTTAACCT
GTCCTACAACCAGCTCTCTTCCATCCCAGAGAACCTGGACCAAGTGGTGGAGAAACTGGAGCAGCTCCTAC
TGGAAGGAAACAAAATATCCGGGATTTGTTCTCCCTTGAGCCTGAAGGAACTGAAGATTTTAAACCTTAGT
AAAAACCACATTCCATCCCTACCTGAAGACTTTCTCGAGGCTTGCCCGAAAGTGGAGAGCTTCAGTGCCCG
CATGAATTTTCTCGCTGCAATGCCTGCCTTACCGTCTTCCATAACTAGCTTAAAATTGTCTCAAAACTCTT
TCACGTGCATTCCAGAAGCGATCTTCAGTCTTCCACACTTGCGGTCCTTGGATATGAGTCACAACAACATT
GAACACCTGCCGGGACCTGCACATTGGAAGTCTCTGAACTTAAGGGAACTCATTTTTAGCAAGAATCAGAT
CAGCACCTTAGACTTGAGCGAAAACCCACACATATGGTCAAGAGTAGAGAAGCTGCATCTCTCTCATAATA
AACTGAAAGAGATTCCTCCAGAAATTGGCCGTCTTGAAAACCTGACATCTCTTGATGTCAGTTACAACCTG
GAACTGAGGTCCTTTCCAAACGAAATGGGGAAGTTAAGCAAAATATGGGATCTTCCCTTGGATGGACTGCA
CCTCAACTTTGACTTTAAGCACATAGGATGCAAAGCCAAAGACATCATAAGGTTTCTACAACAACGTCTGA
AAAAGGCCGTGCCCTACAACCGAATGAAGCTCATGATTGTGGGCAATACGGGGAGTGGTAAGACCACTCTA
CTGCAGCAGCTCATGAAAATGAAGAAATCAGAACTCGGCATGCAGGGCGCCACGGTTGGCATAGACGTGCG
AGACTGGCCCATCCAAATACGAGGCAAAAGGAAAAAGGACCTTGTTCTAAACGTGTGGGACTTTGCAGGCC
GTGAGGAATTCTACAGCACTCACCCCCACTTCATGACCCAGAGAGCCCTGTACCTGGCTGTCTACGACCTC
AGCAAGGGGCAGGCGGAGGTGGATGCCATGAAGCCCTGGCTCTTCAACATCAAGGCTCGTGCCTCTTCTTC
CCCGGTGATTCTGGTGGGCACACATTTGGATGTTTCTGATGAGAAGCAGCGCAAAGCCTGCATAGGCAAAA
TCACGAAGGAACTCCTTAATAAGCGAGGATTCCCCACCATCCGGGACTACCACTTCGTGAATGCCACTGAG
GAGTCGGATGCGCTGGCAAAGCTCCGGAAAACCATCATAAATGAGAGTCTTAATTTCAAGATCCGAGATCA
GCCCGTGGTTGGGCAGCTAATTCCAGATTGCTACGTAGAACTGGAGAAAATAATCTTATCGGAGCGTAAAG
CTGTACCAACGGAGTTTCCTGTAATTAACCGGAAACACTTACTCCAGCTGGTGAAGGAACACCAGCTGCAG
CTGGATGAGAACGAGCTCCCCCACGCTGTTCACTTCCTGAATGAGTCAGGAGTTCTTCTGCATTTTCAAGA
CCCCGCATTGCAGCTGAGTGACCTGTACTTTGTGGAACCCAAGTGGCTTTGTAAAGTCATGGCACAGATTT
TGACCGTGAAAGTGGACGGCTGCCTGAAGCATCCTAAGGGCATCATTTCACGGAGAGATGTGGAAAAATTC
CTTTCCAAGAAAAAGCGATTCCCTAAGAACTACATGGCGCAGTACTTCAAACTTTTAGAAAAATTTCAGAT
CGCATTACCAATAGGGGAAGAATATCTGCTGGTTCCAAGCAGCTTATCTGACCACAGGCCAGTGATAGAGC
TCCCCCACTGTGAGAACTCTGAGATCATCATCCGGCTGTATGAAATGCCATACTTTCCAATGGGATTTTGG
TCAAGATTGATTAACCGATTACTTGAAATCTCACCTTTCATGCTTTCTGGAAGAGAGAGAGCACTACGCCC
AAACCGAATGTACTGGCGCCAAGGCATCTACTTGAATTGGTCTCCAGAAGCCTACTGTCTGGTGGGCTCTG
AAGTCTTAGACAGTCGCCCAGAGAGTTTCTTGAAAATCACAGTTCCATCTTGTAGAAAAGGTTGTATTCTT
TTGGGCCGAGTTGTGGATCATATTGACTCACTCATGGAAGAATGGTTTCCTGGATTGCTGGAGATTGACAT
TTGTGGGGAAGGAGAAACTTTGTTGAAAAAATGGGCATTGTATAGTTTTAATGATGGCGAAGAACATCAGA
AGATCTTGCTTGATGAGTTGATGAAGAAGGCTGAAGAAGGAGACCTGTTAATAAATCCAGATCAACCAAGG
CTCACCATTCCAATATCCCAGATTGCTCCGGACTTGATCTTGGCTGACCTGCCTAGAAATATTATGTTGAA
CAATGACGAACTGGAATTTGAGGAAGCACCCGAGTTTCTCTTAGGTGATGGAAGTTTCGGATCAGTTTATC
GAGCTGCCTACGAAGGAGAGGAAGTGGCTGTGAAGATTTTTAATAAGCACACATCGCTTAGGCTGTTAAGA
CAAGAGTTGGTGGTACTCTGTCATCTCCACCATCCCAGCTTGATCTCCCTGTTGGCGGCTGGGATTCGTCC
TCGGATGCTGGTAATGGAGTTGGCCTCCAAGGGTTCCTTGGATCGCCTGCTGCAGCAGGACAAAGCCAGCC
TCACCCGGACCCTCCAGCACAGAATCGCATTGCATGTGGCCGATGGCCTGAGATATCTGCACTCGGCCATG
ATTATTTACCGTGATCTGAAGCCCCACAACGTGCTACTCTTCACCCTGTATCCCAATGCCGCCATCATTGC
GAAGATTGCGGACTACGGGATTGCACAGTACTGCTGTAGGATGGGAATAAAGACCTCAGAGGGCACCCCAG
GGTTCCGAGCACCTGAAGTTGCCAGAGGAAATGTCATTTATAACCAACAGGCTGATGTTTATTCTTTTGGC
TTACTACTTCATGATATCTGGACAACTGGGAATAGAATCATGGAGGGTTTGAGGTTTCCAAATGAGTTTGA
TGAACTGGCCATACAAGGGAAATTGCCAGACCCAGTTAAAGAATATGGCTGTGCCCCGTGGCCTATGGTTG
AGAAGTTAATTACAAAATGTTTGAAAGAAAATCCTCAAGAAAGACCCACTTCTGCCCAGGTCTTTGACATT
TTGAATTCAGCTGAGTTAATTTGCCTCATGCGACACATTTTCATACCTAAGGACATCACTGTTGAATGCAT
AGCTGCTACAAACCTCAATAGCAAGCGAGCGACTCTCTGGTTGGGCTGTGGGAACACAGAAAAAGGGCAGC
TTTCCTTACTTGACTTGAACACGGAAAGATACAGCTATGAGGAAGTTACTGATAGTAGAATACTGTGCCTG
GCTTTGGTGCATCTTGCTGCTGAGAAAGAGAGCTGGGTTGTGTGTGGGACACAGTCCGGAGCTCTCCTGGT
CATCAATGCTGAAGATGAGACAAGGAGACACACCCTCGACAAGATGACTGATTCTGTTACTTGCTTGTATT
GCAATTCCTTTGCCAAGCAGAGCAAGCAAAGTCACTTCCTTTTGGTGGGAACTGCTGATGGCAACTTAATG
ATATTTGAAGATAAGACCATTAAGTGTAAAGGAGCTGCCCCATTGAAGACACTACACATAGGCGATGTCAG
TACGCCCCTGATGTGCCTGAGCGAGTCCATGAATTCATCTGAAAGACACATCACATGGGGAGGGTGTGGCA
CAAAGATCTTCTCCTTTTCCAATGATTTCACCATTCAGAAACTCATCGAGACAAGAACCAACCAGCTGTTT
TCTTACTCAGCGTTCAGCGATTCTAACATCATAGCGGTGGCAGTGGACACAGCGCTTTATATTGCCAAGAA
AAACAGCCCTGTCGTAGAGGTGTGGGACAAGAAGACAGAAAAACTCTGTGAACTAATAGACTGTGTGCACT
TCTTAAAGGAGGTGATGGTGAAAATAAACAAGGACTCGAAGCACAAGCTGTCCTACTCTGGGAGGGTGAAG
GCACTCTGCCTGCAGAAGAACACAGCTCTCTGGATCGGAACTGGAGGAGGCCACATCTTACTCCTGGATCT
TTCTACACGGCGAGTCATCCGCACCATCCACAATTTCTGTGATTCCGTGAGAGCCATGGCCACAGCTCAGT
TAGGCAACCTTAAAAATGTCATGCTGGTTTTGGGGTACAAGCGGAAGAGTACAGAAGGAACCCAAGAACAA
AAAGAGATACAATCTTGTTTGTCTATTTGGGACCTCAATCTTCCACATGAAGTGCAAAACTTAGAAAAACA
CATTGAAGTAAGAACAGAACTGGCTGATAAAATGAGGAAAACATCTGTCGAATAG
SEQ ID NO: 8
>Reverse Complement of SEQ ID NO: 7
CTATTCGACAGATGTTTTCCTCATTTTATCAGCCAGTTCTGTTCTTACTTCAATGTGTTTTTCTAAGTTTT
GCACTTCATGTGGAAGATTGAGGTCCCAAATAGACAAACAAGATTGTATCTCTTTTTGTTCTTGGGTTCCT
TCTGTACTCTTCCGCTTGTACCCCAAAACCAGCATGACATTTTTAAGGTTGCCTAACTGAGCTGTGGCCAT
GGCTCTCACGGAATCACAGAAATTGTGGATGGTGCGGATGACTCGCCGTGTAGAAAGATCCAGGAGTAAGA
TGTGGCCTCCTCCAGTTCCGATCCAGAGAGCTGTGTTCTTCTGCAGGCAGAGTGCCTTCACCCTCCCAGAG
TAGGACAGCTTGTGCTTCGAGTCCTTGTTTATTTTCACCATCACCTCCTTTAAGAAGTGCACACAGTCTAT
TAGTTCACAGAGTTTTTCTGTCTTCTTGTCCCACACCTCTACGACAGGGCTGTTTTTCTTGGCAATATAAA
GCGCTGTGTCCACTGCCACCGCTATGATGTTAGAATCGCTGAACGCTGAGTAAGAAAACAGCTGGTTGGTT
CTTGTCTCGATGAGTTTCTGAATGGTGAAATCATTGGAAAAGGAGAAGATCTTTGTGCCACACCCTCCCCA
TGTGATGTGTCTTTCAGATGAATTCATGGACTCGCTCAGGCACATCAGGGGCGTACTGACATCGCCTATGT
GTAGTGTCTTCAATGGGGCAGCTCCTTTACACTTAATGGTCTTATCTTCAAATATCATTAAGTTGCCATCA
GCAGTTCCCACCAAAAGGAAGTGACTTTGCTTGCTCTGCTTGGCAAAGGAATTGCAATACAAGCAAGTAAC
AGAATCAGTCATCTTGTCGAGGGTGTGTCTCCTTGTCTCATCTTCAGCATTGATGACCAGGAGAGCTCCGG
ACTGTGTCCCACACACAACCCAGCTCTCTTTCTCAGCAGCAAGATGCACCAAAGCCAGGCACAGTATTCTA
CTATCAGTAACTTCCTCATAGCTGTATCTTTCCGTGTTCAAGTCAAGTAAGGAAAGCTGCCCTTTTTCTGT
GTTCCCACAGCCCAACCAGAGAGTCGCTCGCTTGCTATTGAGGTTTGTAGCAGCTATGCATTCAACAGTGA
TGTCCTTAGGTATGAAAATGTGTCGCATGAGGCAAATTAACTCAGCTGAATTCAAAATGTCAAAGACCTGG
GCAGAAGTGGGTCTTTCTTGAGGATTTTCTTTCAAACATTTTGTAATTAACTTCTCAACCATAGGCCACGG
GGCACAGCCATATTCTTTAACTGGGTCTGGCAATTTCCCTTGTATGGCCAGTTCATCAAACTCATTTGGAA
ACCTCAAACCCTCCATGATTCTATTCCCAGTTGTCCAGATATCATGAAGTAGTAAGCCAAAAGAATAAACA
TCAGCCTGTTGGTTATAAATGACATTTCCTCTGGCAACTTCAGGTGCTCGGAACCCTGGGGTGCCCTCTGA
GGTCTTTATTCCCATCCTACAGCAGTACTGTGCAATCCCGTAGTCCGCAATCTTCGCAATGATGGCGGCAT
TGGGATACAGGGTGAAGAGTAGCACGTTGTGGGGCTTCAGATCACGGTAAATAATCATGGCCGAGTGCAGA
TATCTCAGGCCATCGGCCACATGCAATGCGATTCTGTGCTGGAGGGTCCGGGTGAGGCTGGCTTTGTCCTG
CTGCAGCAGGCGATCCAAGGAACCCTTGGAGGCCAACTCCATTACCAGCATCCGAGGACGAATCCCAGCCG
CCAACAGGGAGATCAAGCTGGGATGGTGGAGATGACAGAGTACCACCAACTCTTGTCTTAACAGCCTAAGC
GATGTGTGCTTATTAAAAATCTTCACAGCCACTTCCTCTCCTTCGTAGGCAGCTCGATAAACTGATCCGAA
ACTTCCATCACCTAAGAGAAACTCGGGTGCTTCCTCAAATTCCAGTTCGTCATTGTTCAACATAATATTTC
TAGGCAGGTCAGCCAAGATCAAGTCCGGAGCAATCTGGGATATTGGAATGGTGAGCCTTGGTTGATCTGGA
TTTATTAACAGGTCTCCTTCTTCAGCCTTCTTCATCAACTCATCAAGCAAGATCTTCTGATGTTCTTCGCC
ATCATTAAAACTATACAATGCCCATTTTTTCAACAAAGTTTCTCCTTCCCCACAAATGTCAATCTCCAGCA
ATCCAGGAAACCATTCTTCCATGAGTGAGTCAATATGATCCACAACTCGGCCCAAAAGAATACAACCTTTT
CTACAAGATGGAACTGTGATTTTCAAGAAACTCTCTGGGCGACTGTCTAAGACTTCAGAGCCCACCAGACA
GTAGGCTTCTGGAGACCAATTCAAGTAGATGCCTTGGCGCCAGTACATTCGGTTTGGGCGTAGTGCTCTCT
CTCTTCCAGAAAGCATGAAAGGTGAGATTTCAAGTAATCGGTTAATCAATCTTGACCAAAATCCCATTGGA
AAGTATGGCATTTCATACAGCCGGATGATGATCTCAGAGTTCTCACAGTGGGGGAGCTCTATCACTGGCCT
GTGGTCAGATAAGCTGCTTGGAACCAGCAGATATTCTTCCCCTATTGGTAATGCGATCTGAAATTTTTCTA
AAAGTTTGAAGTACTGCGCCATGTAGTTCTTAGGGAATCGCTTTTTCTTGGAAAGGAATTTTTCCACATCT
CTCCGTGAAATGATGCCCTTAGGATGCTTCAGGCAGCCGTCCACTTTCACGGTCAAAATCTGTGCCATGAC
TTTACAAAGCCACTTGGGTTCCACAAAGTACAGGTCACTCAGCTGCAATGCGGGGTCTTGAAAATGCAGAA
GAACTCCTGACTCATTCAGGAAGTGAACAGCGTGGGGGAGCTCGTTCTCATCCAGCTGCAGCTGGTGTTCC
TTCACCAGCTGGAGTAAGTGTTTCCGGTTAATTACAGGAAACTCCGTTGGTACAGCTTTACGCTCCGATAA
GATTATTTTCTCCAGTTCTACGTAGCAATCTGGAATTAGCTGCCCAACCACGGGCTGATCTCGGATCTTGA
AATTAAGACTCTCATTTATGATGGTTTTCCGGAGCTTTGCCAGCGCATCCGACTCCTCAGTGGCATTCACG
AAGTGGTAGTCCCGGATGGTGGGGAATCCTCGCTTATTAAGGAGTTCCTTCGTGATTTTGCCTATGCAGGC
TTTGCGCTGCTTCTCATCAGAAACATCCAAATGTGTGCCCACCAGAATCACCGGGGAAGAAGAGGCACGAG
CCTTGATGTTGAAGAGCCAGGGCTTCATGGCATCCACCTCCGCCTGCCCCTTGCTGAGGTCGTAGACAGCC
AGGTACAGGGCTCTCTGGGTCATGAAGTGGGGGTGAGTGCTGTAGAATTCCTCACGGCCTGCAAAGTCCCA
CACGTTTAGAACAAGGTCCTTTTTCCTTTTGCCTCGTATTTGGATGGGCCAGTCTCGCACGTCTATGCCAA
CCGTGGCGCCCTGCATGCCGAGTTCTGATTTCTTCATTTTCATGAGCTGCTGCAGTAGAGTGGTCTTACCA
CTCCCCGTATTGCCCACAATCATGAGCTTCATTCGGTTGTAGGGCACGGCCTTTTTCAGACGTTGTTGTAG
AAACCTTATGATGTCTTTGGCTTTGCATCCTATGTGCTTAAAGTCAAAGTTGAGGTGCAGTCCATCCAAGG
GAAGATCCCATATTTTGCTTAACTTCCCCATTTCGTTTGGAAAGGACCTCAGTTCCAGGTTGTAACTGACA
TCAAGAGATGTCAGGTTTTCAAGACGGCCAATTTCTGGAGGAATCTCTTTCAGTTTATTATGAGAGAGATG
CAGCTTCTCTACTCTTGACCATATGTGTGGGTTTTCGCTCAAGTCTAAGGTGCTGATCTGATTCTTGCTAA
AAATGAGTTCCCTTAAGTTCAGAGACTTCCAATGTGCAGGTCCCGGCAGGTGTTCAATGTTGTTGTGACTC
ATATCCAAGGACCGCAAGTGTGGAAGACTGAAGATCGCTTCTGGAATGCACGTGAAAGAGTTTTGAGACAA
TTTTAAGCTAGTTATGGAAGACGGTAAGGCAGGCATTGCAGCGAGAAAATTCATGCGGGCACTGAAGCTCT
CCACTTTCGGGCAAGCCTCGAGAAAGTCTTCAGGTAGGGATGGAATGTGGTTTTTACTAAGGTTTAAAATC
TTCAGTTCCTTCAGGCTCAAGGGAGAACAAATCCCGGATATTTTGTTTCCTTCCAGTAGGAGCTGCTCCAG
TTTCTCCACCACTTGGTCCAGGTTCTCTGGGATGGAAGAGAGCTGGTTGTAGGACAGGTTAAACTGTTTGA
GGCTTGGACACTTCACCACAGGGTCTAAAACAACTGTTGGTCCGATGTCATTTCGAGAGGCGTCTAGGTGG
ATAACACTTGGCATTTTCAACATGAAGGAGGGAAAGGTGGCGAATTTGTTACTGTGCAAATCCAGATGTGT
CAAGCACTTCAGAGTCTCACACAGCTGTTGTGGGAAGCTCGTGAGTGAATTCTGGTGAAGTTCCAGCTTGG
TGAGATGCTCCAGGTGGCTACTGAGGCAACACTTCTGGCCCAGAGCATCAATATCTTTCAGTTCGTTGGCA
GAAAGGTCTAAAGACGTGATGTGTTCTCTCTCAGAAGCCAGAGAAGAAGAGCTATCTGATTGTCTCGTATG
GGACTGCAGCCTTGAGGATCTGAGAGACTCATCTGAGGACAGTATTTTTCTTTTTCGTCTCAGTAGATCTT
CGTGATCAAAAACAGGACCCAAGGAACTGGAGTGCCTCTGAGCATTTGGTGAGCAGCGCTGCAGAGCTAGG
TCCCTGTAAACTTCTCCTACACTAACTGAGTTGGACTTCTTCTTCACCAGAAAGGAGCTCTCGCTGCCTTC
GCTATCCAGATCGTCACTCTGGCCAAACACACTGTCCATAGAAGAGTCGGGAATGAAGGTCCATTCGCCAA
ATTTCGCCAGCGCATCCTCAGAGAAGTTGCCCTCACTGCCTGAGGCCACGCCTTCTTGAAGAGTGTTTCTC
ATCTGATACCGGAGCACTTTCCTCGCTAGGACAGACCCCGCATTTGTTTGTTTCCTCAAATTAGATGACTT
ATCTGGAAATAAAGGGCCTAGCCAAGAAGGATCAAGTTTTCCTATGCAAAATCCTCCAAGGCAAATGCTGT
TGTTGGCCAGGTCCAGGGCAAGTCTCCTCAGGAGTAAGCTGATGACCTGGTTGTCGCCCTTTTGGATGCTT
ACTGTCAGGGCTTTCCGTACATCTTGTTCACGGCACCCACTGTTAAGCAATAGTTCCACCAATTTAGGGCT
GCTCTCTTTCTCACATACCTGATAGATTAAAGAAGTTGCCCCCTTCGCTTGATTGGCATCGGCTCCCAAGA
GGAGCAAACATTCGACCATGATGCTGTTGTTCTGATCGCAGGCTCTCTCTAGCATCTTGCTTTTCAGCTCA
TCATCCACAGCCACTTTTGCAAAGCATTTGCAGCATAAGTTGAGAAACTGCTCATCCTTTTGTTCCAGGAC
ACCGGAAGACATCTGATGAAACATCACCACATCAAATGAATAGTGCACTAGCAGCTTGGAGAAAGATACGG
ACAGGTCAAGCATTGACAAGACCGTCTGTAATCCTGTAGTCTGTACTTCAGCAACATCTTTAAATCGCTGC
AAGGTGGAAGCCAGAATTTTTGCCAGGAGGTGCCCTGTCCCTATGCAGAAATTCTTCTTTGTCATCAGGCA
TCCCATAAGGTGTAAGCCCAGACACTGAATTTCTTGGTCATCTGGATACATCTGTAAGGTATGGAGGACTG
AGTCAACTGCTCCATGCAGGGATAACATCTCTAAGGCATCGGGAAGATGTGCGAAAGAAGAGATGACTTTC
AATCCACATTTCTGAATCCCGGGATTCCCAATGAACCTGTTCAGAGCGGCTAGAACCAGCTTGTGGATGTC
AGTCCTGAAGCACTGTGTTCTGAGCACGTTTGGTTGGCATCGCGAGTCATCCCTGGAATCTTCTGATACTC
CCGGCACCACAAAATGCAGAAGAGCTCGCAGTGCCTCCAGCTGGACTGACAGAGACGTTCCATGGGTTCTC
ATCACTGTTAGTATTTTGGGGATCACTGCCGCCACTGTATCCAAAGAAGGGTTGCTTCCTTCAAACAGATG
ACTCAGCATCTTGCAGCCACTCTCTGCCACCTCAGGAACCTGGGCGTGCCGCTGCATCAACTCCAAGACAT
TCAGGTACACTCCTTTTGCAAGCAGGATTTTCCTGAAATTAACGTTTTGTTCCAAGAGAGTGGACAGAGCA
TGCGCAGCTGCTTGGAAGACGTCTTTGGAAGAAGAGTGCATCAGCATAGACAGCATCACTTCCCTGTGCGC
CGGGAACTGGCCATCTTCATCTCCAATCTTCTCGTGCAAACTGCTCTGGTACATGAGGAGATTATTTAGGG
CCCAGCAGGCGGCCTCCTGCACGTGTTTGTTCTTTCGATGGCGCATCAGGGCTTTATAGCAGGGTTCCAAC
CAGAAAGGCTTCTCACTGTCCTCATCGCTGTTTTCCTGAGTCTCACTTCTTTCTTCCAGGTCTTGGTTTAA
GAAAATAGTCTCGGTGAGGAGGGCTAAGCAGCTGAGTGCAGAGATCTGTAAGGCTACGTTCTCGGGATACC
GCTGGACGGCTTTCACCACAAAGACATGGACTTCGTTCAACACCAGGATGTTGAAAAAATTACCTAATGTA
AGCTTGTGGAGCAAGGAGCAGCTCACCTCTTGAATGTTTTCACTGGTGGGGAATGTTTTCATGGCTTCCAC
CACAATATTGTAACACCTGACATTCCCACTCATGAGGACCTCCACATTGCTGCAAGTGACGGCCAGAGAAT
GCAGGCAGCAGAGTACATGGTGCACAATCTCCTCGTCCCTCTTGAAGCTGCGGAACGTACTCAGCAGGGTC
ATGTAATCTTTGTTCTCCACAAACTCAGTCAGTTGCTCCTCGGACACTCTCTCGAACAGCACATGTAAAGC
CTTGCACGCAAGCTTCTGGACTTCCTCGTTGGCTGAATATCTGTGCATGGCATCAAAAATTAACAGGAAAA
CATCACATTCTTCATCCAGTATCAGCAGAGTAATTTTACCTGAATCTAGGAGGAGATCTAAGGCTTTTAGT
CCAACTATTGACAGGTTTACGTTGGCATGATGAACAGTTAACATTTTAAGAATCAGTCGGTGAATACCAAG
GACTTCCCAATCATTCCCAATATCCTGGGGTCCTATTAAGCTTTGCAATGTCCCTGGACAGACTTCTATTA
ATTTGCACAGAAGTGACCACCCCACCTGCTGCACACTGGCGACTCTCATGTAGGAGTCCAGGACTATCAAC
AGAGGCACGTGGACATTTTTGCCTTCAAATAACTTGGAGGCGCGGTCGGAGTAGGTGAACACCAGAATGTC
CTCCAGGAGCTGGAGCAACGTCTCGATCTGCTTGCCTTCCTGGACATTATTCAGCCTGACTATCAACTTCT
TCAGAGCCTCCTCCTCCTCTTCCTCGTCGCAGCCCTGACAGGCGCCACTGGCCAT
SEQ ID NO: 1808
>XM_024448833.1 Homo sapiens leucine rich repeat kinase 2 (LRRK2),
transcript variant X3, mRNA.
TTCAAACATCATAAGACCGGCACTCTCTCCCAAAGATACAAGCTGTAGCAAGGAGTTTTGTGCATATCAGT
TTCCCAGCTCATAGGGAAGTGATGCTCTCCATGCTGATGCATTCTTCATCAAAGGAAGTTTTCCAGGCATC
TGCGAATGCATTGTCAACTCTCTTAGAACAAAATGTTAATTTCAGAAAAATACTGTTATCAAAAGGAATAC
ACCTGAATGTTTTGGAGTTAATGCAGAAGCATATACATTCTCCTGAAGTGGCTGAAAGTGGCTGTAAAATG
CTAAATCATCTTTTTGAAGGAAGCAACACTTCCCTGGATATAATGGCAGCAGTGGTCCCCAAAATACTAAC
AGTTATGAAACGTCATGAGACATCATTACCAGTGCAGCTGGAGGCGCTTCGAGCTATTTTACATTTTATAG
TGCCTGGCATGCCAGAAGAATCCAGGGAGGATACAGAATTTCATCATAAGCTAAATATGGTTAAAAAACAG
TGTTTCAAGAATGATATTCACAAACTGGTCCTAGCAGCTTTGAACAGGTTCATTGGAAATCCTGGGATTCA
GAAATGTGGATTAAAAGTAATTTCTTCTATTGTACATTTTCCTGATGCATTAGAGATGTTATCCCTGGAAG
GTGCTATGGATTCAGTGCTTCACACACTGCAGATGTATCCAGATGACCAAGAAATTCAGTGTCTGGGTTTA
AGTCTTATAGGATACTTGATTACAAAGAAGAATGTGTTCATAGGAACTGGACATCTGCTGGCAAAAATTCT
GGTTTCCAGCTTATACCGATTTAAGGATGTTGCTGAAATACAGACTAAAGGATTTCAGACAATCTTAGCAA
TCCTCAAATTGTCAGCATCTTTTTCTAAGCTGCTGGTGCATCATTCATTTGACTTAGTAATATTCCATCAA
ATGTCTTCCAATATCATGGAACAAAAGGATCAACAGTTTCTAAACCTCTGTTGCAAGTGTTTTGCAAAAGT
AGCTATGGATGATTACTTAAAAAATGTGATGCTAGAGAGAGCGTGTGATCAGAATAACAGCATCATGGTTG
AATGCTTGCTTCTATTGGGAGCAGATGCCAATCAAGCAAAGGAGGGATCTTCTTTAATTTGTCAGGTATGT
GAGAAAGAGAGCAGTCCCAAATTGGTGGAACTCTTACTGAATAGTGGATCTCGTGAACAAGATGTACGAAA
AGCGTTGACGATAAGCATTGGGAAAGGTGACAGCCAGATCATCAGCTTGCTCTTAAGGAGGCTGGCCCTGG
ATGTGGCCAACAATAGCATTTGCCTTGGAGGATTTTGTATAGGAAAAGTTGAACCTTCTTGGCTTGGTCCT
TTATTTCCAGATAAGACTTCTAATTTAAGGAAACAAACAAATATAGCATCTACACTAGCAAGAATGGTGAT
CAGATATCAGATGAAAAGTGCTGTGGAAGAAGGAACAGCCTCAGGCAGCGATGGAAATTTTTCTGAAGATG
TGCTGTCTAAATTTGATGAATGGACCTTTATTCCTGACTCTTCTATGGACAGTGTGTTTGCTCAAAGTGAT
GACCTGGATAGTGAAGGAAGTGAAGGCTCATTTCTTGTGAAAAAGAAATCTAATTCAATTAGTGTAGGAGA
ATTTTACCGAGATGCCGTATTACAGCGTTGCTCACCAAATTTGCAAAGACATTCCAATTCCTTGGGGCCCA
TTTTTGATCATGAAGATTTACTGAAGCGAAAAAGAAAAATATTATCTTCAGATGATTCACTCAGGTCATCA
AAACTTCAATCCCATATGAGGCATTCAGACAGCATTTCTTCTCTGGCTTCTGAGAGAGAATATATTACATC
ACTAGACCTTTCAGCAAATGAACTAAGAGATATTGATGCCCTAAGCCAGAAATGCTGTATAAGTGTTCATT
TGGAGCATCTTGAAAAGCTGGAGCTTCACCAGAATGCACTCACGAGCTTTCCACAACAGCTATGTGAAACT
CTGAAGAGTTTGACACATTTGGACTTGCACAGTAATAAATTTACATCATTTCCTTCTTATTTGTTGAAAAT
GAGTTGTATTGCTAATCTTGATGTCTCTCGAAATGACATTGGACCCTCAGTGGTTTTAGATCCTACAGTGA
AATGTCCAACTCTGAAACAGTTTAACCTGTCATATAACCAGCTGTCTTTTGTACCTGAGAACCTCACTGAT
GTGGTAGAGAAACTGGAGCAGCTCATTTTAGAAGGAAATAAAATATCAGGGATATGCTCCCCCTTGAGACT
GAAGGAACTGAAGATTTTAAACCTTAGTAAGAACCACATTTCATCCCTATCAGAGAACTTTCTTGAGGCTT
GTCCTAAAGTGGAGAGTTTCAGTGCCAGAATGAATTTTCTTGCTGCTATGCCTTTCTTGCCTCCTTCTATG
ACAATCCTAAAATTATCTCAGAACAAATTTTCCTGTATTCCAGAAGCAATTTTAAATCTTCCACACTTGCG
GTCTTTAGATATGAGCAGCAATGATATTCAGTACCTACCAGGTCCCGCACACTGGAAATCTTTGAACTTAA
GGGAACTCTTATTTAGCCATAATCAGATCAGCATCTTGGACTTGAGTGAAAAAGCATATTTATGGTCTAGA
GTAGAGAAACTGCATCTTTCTCACAATAAACTGAAAGAGATTCCTCCTGAGATTGGCTGTCTTGAAAATCT
GACATCTCTGGATGTCAGTTACAACTTGGAACTAAGATCCTTTCCCAATGAAATGGGGAAATTAAGCAAAA
TATGGGATCTTCCTTTGGATGAACTGCATCTTAACTTTGATTTTAAACATATAGGATGTAAAGCCAAAGAC
ATCATAAGGTTTCTTCAACAGCGATTAAAAAAGGCTGTGCCTTATAACCGAATGAAACTTATGATTGTGGG
AAATACTGGGAGTGGTAAAACCACCTTATTGCAGCAATTAATGAAAACCAAGAAATCAGATCTTGGAATGC
AAAGTGCCACAGTTGGCATAGATGTGAAAGACTGGCCTATCCAAATAAGAGACAAAAGAAAGAGAGATCTC
GTCCTAAATGTGTGGGATTTTGCAGGTCGTGAGGAATTCTATAGTACTCATCCCCATTTTATGACGCAGCG
AGCATTGTACCTTGCTGTCTATGACCTCAGCAAGGGACAGGCTGAAGTTGATGCCATGAAGCCTTGGCTCT
TCAATATAAAGGCTCGCGCTTCTTCTTCCCCTGTGATTCTCGTTGGCACACATTTGGATGTTTCTGATGAG
AAGCAACGCAAAGCCTGCATGAGTAAAATCACCAAGGAACTCCTGAATAAGCGAGGGTTCCCTGCCATACG
AGATTACCACTTTGTGAATGCCACCGAGGAATCTGATGCTTTGGCAAAACTTCGGAAAACCATCATAAACG
AGAGCCTTAATTTCAAGATCCGAGATCAGCTTGTTGTTGGACAGCTGATTCCAGACTGCTATGTAGAACTT
GAAAAAATCATTTTATCGGAGCGTAAAAATGTGCCAATTGAATTTCCCGTAATTGACCGGAAACGATTATT
ACAACTAGTGAGAGAAAATCAGCTGCAGTTAGATGAAAATGAGCTTCCTCACGCAGTTCACTTTCTAAATG
AATCAGGAGTCCTTCTTCATTTTCAAGACCCAGCACTGCAGTTAAGTGACTTGTACTTTGTGGAACCCAAG
TGGCTTTGTAAAATCATGGCACAGATTTTGACAGTGAAAGTGGAAGGTTGTCCAAAACACCCTAAGGGCAT
TATTTCGCGTAGAGATGTGGAAAAATTTCTTTCAAAAAAAAGGAAATTTCCAAAGAACTACATGTCACAGT
ATTTTAAGCTCCTAGAAAAATTCCAGATTGCTTTGCCAATAGGAGAAGAATATTTGCTGGTTCCAAGCAGT
TTGTCTGACCACAGGCCTGTGATAGAGCTTCCCCATTGTGAGAACTCTGAAATTATCATCCGACTATATGA
AATGCCTTATTTTCCAATGGGATTTTGGTCAAGATTAATCAATCGATTACTTGAGATTTCACCTTACATGC
TTTCAGGGAGAGAACGAGCACTTCGCCCAAACAGAATGTATTGGCGACAAGGCATTTACTTAAATTGGTCT
CCTGAAGCTTATTGTCTGGTAGGATCTGAAGTCTTAGACAATCATCCAGAGAGTTTCTTAAAAATTACAGT
TCCTTCTTGTAGAAAAGGCTGTATTCTTTTGGGCCAAGTTGTGGACCACATTGATTCTCTCATGGAAGAAT
GGTTTCCTGGGTTGCTGGAGATTGATATTTGTGGTGAAGGAGAAACTCTGTTGAAGAAATGGGCATTATAT
AGTTTTAATGATGGTGAAGAACATCAAAAAATCTTACTTGATGACTTGATGAAGAAAGCAGAGGAAGGAGA
TCTCTTAGTAAATCCAGATCAACCAAGGCTCACCATTCCAATATCTCAGATTGCCCCTGACTTGATTTTGG
CTGACCTGCCTAGAAATATTATGTTGAATAATGATGAGTTGGAATTTGAACAAGCTCCAGAGTTTCTCCTA
GGTGATGGCAGTTTTGGATCAGTTTACCGAGCAGCCTATGAAGGAGAAGAAGTGGCTGTGAAGATTTTTAA
TAAACATACATCACTCAGGCTGTTAAGACAAGAGCTTGTGGTGCTTTGCCACCTCCACCACCCCAGTTTGA
TATCTTTGCTGGCAGCTGGGATTCGTCCCCGGATGTTGGTGATGGAGTTAGCCTCCAAGGGTTCCTTGGAT
CGCCTGCTTCAGCAGGACAAAGCCAGCCTCACTAGAACCCTACAGCACAGGATTGCACTCCACGTAGCTGA
TGGTTTGAGATACCTCCACTCAGCCATGATTATATACCGAGACCTGAAACCCCACAATGTGCTGCTTTTCA
CACTGTATCCCAATGCTGCCATCATTGCAAAGATTGCTGACTACGGCATTGCTCAGTACTGCTGTAGAATG
GGGATAAAAACATCAGAGGGCACACCAGGGTTTCGTGCACCTGAAGTTGCCAGAGGAAATGTCATTTATAA
CCAACAGGCTGATGTTTATTCATTTGGTTTACTACTCTATGACATTTTGACAACTGGAGGTAGAATAGTAG
AGGGTTTGAAGTTTCCAAATGAGTTTGATGAATTAGAAATACAAGGAAAATTACCTGATCCAGTTAAAGAA
TATGGTTGTGCCCCATGGCCTATGGTTGAGAAATTAATTAAACAGTGTTTGAAAGAAAATCCTCAAGAAAG
GCCTACTTCTGCCCAGGTCTTTGACATTTTGAATTCAGCTGAATTAGTCTGTCTGACGAGACGCATTTTAT
TACCTAAAAACGTAATTGTTGAATGCATGGTTGCTACACATCACAACAGCAGGAATGCAAGCATTTGGCTG
GGCTGTGGGCACACCGACAGAGGACAGCTCTCATTTCTTGACTTAAATACTGAAGGATACACTTCTGAGGA
AGTTGCTGATAGTAGAATATTGTGCTTAGCCTTGGTGCATCTTCCTGTTGAAAAGGAAAGCTGGATTGTGT
CTGGGACACAGTCTGGTACTCTCCTGGTCATCAATACCGAAGATGGGAAAAAGAGACATACCCTAGAAAAG
ATGACTGATTCTGTCACTTGTTTGTATTGCAATTCCTTTTCCAAGCAAAGCAAACAAAAAAATTTTCTTTT
GGTTGGAACCGCTGATGGCAAGTTAGCAATTTTTGAAGATAAGACTGTTAAGCTTAAAGGAGCTGCTCCTT
TGAAGATACTAAATATAGGAAATGTCAGTACTCCATTGATGTGTTTGAGTGAATCCACAAATTCAACGGAA
AGAAATGTAATGTGGGGAGGATGTGGCACAAAGATTTTCTCCTTTTCTAATGATTTCACCATTCAGAAACT
CATTGAGACAAGAACAAGCCAACTGTTTTCTTATGCAGCTTTCAGTGATTCCAACATCATAACAGTGGTGG
TAGACACTGCTCTCTATATTGCTAAGCAAAATAGCCCTGTTGTGGAAGTGTGGGATAAGAAAACTGAAAAA
CTCTGTGGACTAATAGACTGCGTGCACTTTTTAAGGGAGGTAATGGTAAAAGAAAACAAGGAATCAAAACA
CAAAATGTCTTATTCTGGGAGAGTGAAAACCCTCTGCCTTCAGAAGAACACTGCTCTTTGGATAGGAACTG
GAGGAGGCCATATTTTACTCCTGGATCTTTCAACTCGTCGACTTATACGTGTAATTTACAACTTTTGTAAT
TCGGTCAGAGTCATGATGACAGCACAGCTAGGAAGCCTTAAAAATGTCATGCTGGTATTGGGCTACAACCG
GAAAAATACTGAAGGTACACAAAAGCAGAAAGAGATACAATCTTGCTTGACCGTTTGGGACATCAATCTTC
CACATGAAGTGCAAAATTTAGAAAAACACATTGAAGTGAGAAAAGAATTAGCTGAAAAAATGAGACGAACA
TCTGTTGAGTAAGAGAGAAATAGGAATTGTCTTTGGATAGGAAAATTATTCTCTCCTCTTGTAAATATTTA
TTTTAAAAATGTTCACATGGAAAGGGTACTCACATTTTTTGAAATAGCTCGTGTGTATGAAGGAATGTTAT
TATTTTTAATTTAAATATATGTAAAAATACTTACCAGTAAATGTGTATTTTAAAGAACTATTTAAAACACA
ATGTTATATTTCTTATAAATACCAGTTACTTTCGTTCATTAATTAATGAAAATAAATCTGTGAAGTACCTA
ATTTAAGTACTCATACTAAAATTTATAAGGCCGATAATTTTTTGTTTTCTTGTCTGTAATGGAGGTAAACT
TTATTTTAAATTCTGTGCTTAAGACAGGACTATTGCTTGTCGATTTTTCTAGAAATCTGCACGGTATAATG
AAAATATTAAGACAGTTTCCCATGTAATGTATTCCTTCTTAGATTGCATCGAAATGCACTATCATATATGC
TTGTAAATATTCAAATGAATTTGCACTAATAAAGTCCTTTGTTGGTATGTGAATTCTCTTTGTTGCTGTTG
CAAACAGTGCATCTTACACAACTTCACTCAATTCAAAAGAAAACTCCATTAAAAGTACTAATGAAAAAACA
TGACATACTGTCAAAGTCCTCATATCTAGGAAAGACACAGAAACTCTCTTTGTCACAGAAACTCTCTGTGT
CTTTCCTAGACATAATAGAGTTGTTTTTCAACTCTATGTTTGAATGTGGATACCCTGAATTTTGTATAATT
AGTGTAAATACAGTGTTCAGTCCTTCAAGTGATATTTTTATTTTTTTATTCATACCACTAGCTACTTGTTT
TCTAATCTGCTTCATTCTAATGCTTATATTCATCTTTTCCCTAAATTTGTGATGCTGCAGATCCTACATCA
TTCAGATAGAAACCTTTTTTTTTTTCAGAATTATAGAATTCCACAGCTCCTACCAAGACCATGAGGATAAA
TATCTAACACTTTTCAGTTGCTGAAGGAGAAAGGAGCTTTAGTTATGATGGATAAAAATATCTGCCACCCT
AGGCTTCCAAATTATACTTAAATTGTTTACATAGCTTACCACAATAGGAGTATCAGGGCCAAATACCTATG
TAATAATTTGAGGTCATTTCTGCTTTAGGAAAAGTACTTTCGGTAAATTCTTTGGCCCTGACCAGTATTCA
TTATTTCAGATAATTCCCTGTGATAGGACAACTAGTACATTTAATATTCTCAGAACTTATGGCATTTTACT
ATGTGAAAACTTTAAATTTATTTATATTAAGGGTAATCAAATTCTTAAAGATGAAAGATTTTCTGTATTTT
AAAGGAAGCTATGCTTTAACTTGTTATGTAATTAACAAAAAAATCATATATAATAGAGCTCTTTGTTCCAG
TGTTATCTCTTTCATTGTTACTTTGTATTTGCAATTTTTTTTACCAAAGACAAATTAAAAAAATGAATACC
ATATTTAAATGGAATAATAAAGGTTTTTTAAAAACTT
SEQ ID NO: 1809
>Reverse Complement of SEQ ID NO: 1808
CTTCCCTATGAGCTGGGAAACTGATATGCACAAAACTCCTTGCTACAGCTTGTATCTTTGGGAGAGAGTGC
CGGTCTTATGATGTTTGAATAACATTTTGTTCTAAGAGAGTTGACAATGCATTCGCAGATGCCTGGAAAAC
TTCCTTTGATGAAGAATGCATCAGCATGGAGAGCATCATTTCAGCCACTTCAGGAGAATGTATATGCTTCT
GCATTAACTCCAAAACATTCAGGTGTATTCCTTTTGATAACAGTATTTTTCTGAAATTAACTGTTAGTATT
TTGGGGACCACTGCTGCCATTATATCCAGGGAAGTGTTGCTTCCTTCAAAAAGATGATTTAGCATTTTACA
GCCACTGGATTCTTCTGGCATGCCAGGCACTATAAAATGTAAAATAGCTCGAAGCGCCTCCAGCTGCACTG
GTAATGATGTCTCATGACGTTTCATCAAAGCTGCTAGGACCAGTTTGTGAATATCATTCTTGAAACACTGT
TTTTTAACCATATTTAGCTTATGATGAAATTCTGTATCCTCCCATAACATCTCTAATGCATCAGGAAAATG
TACAATAGAAGAAATTACTTTTAATCCACATTTCTGAATCCCAGGATTTCCAATGAACCTGTCTATAAGAC
TTAAACCCAGACACTGAATTTCTTGGTCATCTGGATACATCTGCAGTGTGTGAAGCACTGAATCCATAGCA
CCTTCCAGGGCATCCTTAAATCGGTATAAGCTGGAAACCAGAATTTTTGCCAGCAGATGTCCAGTTCCTAT
GAACACATTCTTCTTTGTAATCAAGTATCATGAATGATGCACCAGCAGCTTAGAAAAAGATGCTGACAATT
TGAGGATTGCTAAGATTGTCTGAAATCCTTTAGTCTGTATTTCAGCAATTGCAAAACACTTGCAACAGAGG
TTTAGAAACTGTTGATCCTTTTGTTCCATGATATTGGAAGACATTTGATGGAATATTACTAAGTCAAATAG
AAGCAAGCATTCAACCATGATGCTGTTATTCTGATCACACGCTCTCTCTAGCATCACATTTTTTAAGTAAT
CATCCATAGCTACTTAGAGTTCCACCAATTTGGGACTGCTCTCTTTCTCACATACCTGACAAATTAAAGAA
GATCCCTCCTTTGCTTGATTGGCATCTGCTCCCAAGAGCAAGCTGATGATCTGGCTGTCACCTTTCCCAAT
GCTTATCGTCAACGCTTTTCGTACATCTTGTTCACGAGATCCACTATTCAGTAAAGGACCAAGCCAAGAAG
GTTCAACTTTTCCTATACAAAATCCTCCAAGGCAAATGCTATTGTTGGCCACATCCAGGGCCAGCCTCCTT
ACACTTTTCATCTGATATCTGATCACCATTCTTGCTAGTGTAGATGCTATATTTGTTTGTTTCCTTAAATT
AGAAGTCTTATCTGGAAATAAGTCAGGAATAAAGGTCCATTCATCAAATTTAGACAGCACATCTTCAGAAA
AATTTCCATCGCTGCCTGAGGCTGTTCCTTCTTCCACAGTTGAATTAGATTTCTTTTTCACAAGAAATGAG
CCTTCACTTCCTTCACTATCCAGGTCATCACTTTGAGCAAACACACTGTCCATAGAAGCAAAAATGGGCCC
CAAGGAATTGGAATGTCTTTGCAAATTTGGTGAGCAACGCTGTAATACGGCATCTCGGTAAAATTCTCCTA
CACTAAAATGCCTCATATGGGATTGAAGTTTTGATGACCTGAGTGAATCATCTGAAGATAATATTTTTCTT
TTTCGCTTCAGTAAATCTTCATGATTTAGGGCATCAATATCTCTTAGTTCATTTGCTGAAAGGTCTAGTGA
TGTAATATATTCTCTCTCAGAAGCCAGAGAAGAAATGCTGTCTGATAGCTGTTGTGGAAAGCTCGTGAGTG
CATTCTGGTGAAGCTCCAGCTTTTCAAGATGCTCCAAATGAACACTTATACAGCATTTCTGGCCAATACAA
CTCATTTTCAACAAATAAGAAGGAAATGATGTAAATTTATTACTGTGCAAGTCCAAATGTGTCAAACTCTT
CAGAGTTTCACACAGGTTAAACTGTTTCAGAGTTGGACATTTCACTGTAGGATCTAAAACCACTGAGGGTC
CAATGTCATTTCGAGAGACATCAAGATTAGCTGATATTTTATTTCCTTCTAAAATGAGCTGCTCCAGTTTC
TCTACCACATCAGTGAGGTTCTCAGGTACAAAAGACAGCTGGTTATATGCCTCAAGAAAGTTCTCTGATAG
GGATGAAATGTGGTTCTTACTAAGGTTTAAAATCTTCAGTTCCTTCAGTCTCAAGGGGGAGCATATCCATA
ATTTTAGGATTGTCATAGAAGGAGGCAAGAAAGGCATAGCAGCAAGAAAATTCATTCTGGCACTGAAACTC
TCCACTTTAGGACAAGGGTACTGAATATCATTGCTGCTCATATCTAAAGACCGCAAGTGTGGAAGATTTAA
AATTGCTTCTGGAATACAGGAAAATTTGTTCTGAGCTTTTTCACTCAAGTCCAAGATGCTGATCTGATTAT
GGCTAAATAAGAGTTCCCTTAAGTTCAAAGATTTCCAGTGTGCGGGACCTGGTATCAGATTTTCAAGACAG
CCAATCTCAGGAGGAATCTCTTTCAGTTTATTGTGAGAAAGATGCAGTTTCTCTACTCTAGACCATAAATA
TGCATCCAAAGGAAGATCCCATATTTTGCTTAATTTCCCCATTTCATTGGGAAAGGATCTTAGTTCCAAGT
TGTAACTGACATCCAGAGATGGCACAGCCTTTTTTAATCGCTGTTGAAGAAACCTTATGATGTCTTTGGCT
TTACATCCTATATGTTTAAAATCAAAGTTAAGATGCAGTTCTGATTTCTTGGTTTTCATTAATTGCTGCAA
TAAGGTGGTTTTACCACTCCCAGTATTTCCCACAATCATAAGTTTCATTCGGTTATAAGTTAGGACGAGAT
CTCTCTTTCTTTTGTCTCTTATTTGGATAGGCCAGTCTTTCACATCTATGCCAACTGTGGCACTTTGCATT
CCAAGATGGTCATAGACAGCAAGGTACAATGCTCGCTGCGTCATAAAATGGGGATGAGTACTATAGAATTC
CTCACGACCTGCAAAATCCCACACATCAACGAGAATCACAGGGGAAGAAGAAGCGCGAGCCTTTATATTGA
AGAGCCAAGGCTTCATGGCATCAACTTCAGCCTGTCCCTTGCTGACAGGGAACCCTCGCTTATTCAGGAGT
TCCTTGGTGATTTTACTCATGCAGGCTTTGCGTTGCTTCTCATCAGAAACATCCAAATGTGTGCAATTAAG
GCTCTCGTTTATGATGGTTTTCCGAAGTTTTGCCAAAGCATCAGATTCCTCGGTGGCATTCACAAAGTGGT
AATCTCGTATGGCATTTTTACGCTCCGATAAAATGATTTTTTCAAGTTCTACATAGCAGTCTGGAATCAGC
TGTCCAACAACAAGCTGATCTCGGATCTTGAGAGGAAGCTCATTTTCATCTAACTGCAGCTGATTTTCTCT
CACTAGTTGTAATAATCGTTTCCGGTCAATTACGGGAAATTCAATTGGCATGGGTTCCACAAAGTACAAGT
CACTTAACTGCAGTGCTGGGTCTTGAAAATGAAGAAGGACTCCTGATTCATTTAGAAAGTGAACTGCGTCA
TCTCTACGCGAAATAATGCCCTTAGGGTGTTTTGGACAACCTTCCACTTTCACTGTCAAAATCTGTGCCAT
GATTTTACAAAGCCACTGCAAAGCAATCTGGAATTTTTCTAGGAGCTTAAAATACTGTGACATGTAGTTCT
TTGGAAATTTCCTTTTTTTTGAAAGAAATTTTTCCATAATTTCAGAGTTCTCACAATGGGGAAGCTCTATC
ACAGGCCTGTGGTCAGACAAACTGCTTGGAACCAGCAAATATTCTTCTCCTATTGAAAGCATGTAAGGTGA
AATCTCAAGTAATCGATTGATTAATCTTGACCAAAATCCCATTGGAAAATAAGGCATTTCATATAGTCGGA
TGACTACCAGACAATAAGCTTCAGGAGACCAATTTAAGTAAATGCCTTGTCGCCAATACATTCTGTTTGGG
CGAAGTGCTCGTTCTCTCCCTGCAACTTGGCCCAAAAGAATACAGCCTTTTCTACAAGAAGGAACTGTAAT
TTTTAAGAAACTCTCTGGATGATTGTCTAAGACTTCAGATCATTTCTTCAACAGAGTTTCTCCTTCACCAC
AAATATCAATCTCCAGCAACCCAGGAAACCATTCTTCCATGAGAGAATCAATGTGGTCCACTAAGAGATCT
CCTTCCTCTGCTTTCTTCATCAAGTCATCAAGTAAGATTTTTTGATGTTCTTCACCATCATTAAAACTATA
TAATGCCCTCAACATAATATTTCTAGGCAGGTCAGCCAAAATCAAGTCAGGGGCAATCTGAGATATTGGAA
TGGTGAGCCTTGGTTGATCTGGATTTACTCCTTCATAGGCTGCTCGGTAAACTGATCCAAAACTGCCATCA
CCTAGGAGAAACTCTGGAGCTTGTTCAAATTCCAACTCATCATTATTGGGGTGGTGGAGGTGGCAAAGCAC
CACAAGCTCTTGTCTTAACAGCCTGAGTGATGTATGTTTATTAAAAATCTTCACAGCCACTTCTTGCTGAA
GCAGGCGATCCAAGGAACCCTTGGAGGCTAACTCCATCACCAACATCCGGGGACGAATCCCAGCTGCCAGC
AAAGATATCAAACTAATCATGGCTGAGTGGAGGTATCTCAAACCATCAGCTACGTGGAGTGCAATCCTGTG
CTGTAGGGTTCTAGTGAGGCTGGCTTTGTCCTCAATGCCGTAGTCAGCAATCTTTGCAATGATGGCAGCAT
TGGGATACAGTGTGAAAAGCAGCACATTGTGGGGTTTCAGGTCTCGGTATATATAAATGACATTTCCTCTG
GCAACTTCAGGTGCACGAAACCCTGGTGTGCCCTCTGATGTTTTTATCCCCATTCTACAGCAGTACTGAGT
TGGAAACTTCAAACCCTCTACTATTCTACCTCCAGTTGTCAAAATGTCATAGAGTAGTAAACCAAATGAAT
AAACATCAGCCTGTTGGTTTAATTTCTCAACCATAGGCCATGGGGCACAACCATATTCTTTAACTGGATCA
GGTAATTTTCCTTGTATTTCTAATTCATCAAACTCATTCAGACAGACTAATTCAGCTGAATTCAAAATGTC
AAAGACCTGGGCAGAAGTAGGCCTTTCTTGAGGATTTTCTTTCAAACACTGTTTAAAGCCCAGCCAAATGC
TTGCATTCCTGCTGTTGTGATGTGTAGCAACCATGCATTCAACAATTACGTTTTTAGGTAATAAAATGCGT
CTCGACAATATTCTACTATCAGCAACTTCCTCAGAAGTGTATCCTTCAGTATTTAAGTCAAGAAATGAGAG
CTGTCCTCTGTCGGTGTGCCCACCTTCGGTATTGATGACCAGGAGAGTACCAGACTGTGTCCCAGACACAA
TCCAGCTTTCCTTTTCAACAGGAAGATGCACCAAGGCTAAGCTTTTTTGTTTGCTTTGCTTGGAAAAGGAA
TTGCAATACAAACAAGTGACAGAATCAGTCATCTTTTCTAGGGTATGTCTCTTTTTCCCATGTATCTTCAA
AGGAGCAGCTCCTTTAAGCTTAACAGTCTTATCTTCAAAAATTGCTAACTTGCCATCAGCGGTTCCAACCA
AAAGAAAATTGCCACATCCTCCCCACATTACATTTCTTTCCGTTGAATTTGTGGATTCACTCAAACACATC
AATGGAGTACTGACATTTCCTATATTTACACTGAAAGCTGCATAAGAAAACAGTTGGCTTGTTCTTGTCTC
AATGAGTTTCTGAATGGTGAAATCATTAGAAAAGGAGAAAATCTTTGCAGTTTTCTTATCCCACACTTCCA
CAACAGGGCTATTTTGCTTAGCAATATAGAGAGCAGTGTCTACCACCACTGTTATGATGTTGGAATAATAA
GACATTTTGTGTTTTGATTCCTTGTTTTCTTTTACCATTACCTCCCTTAAAAAGTGCACGCAGTCTATTAG
TCCACAGAGTTTTTTTGAAAGATCCAGGAGTAAAATATGGCCTCCTCCAGTTCCTATCCAAAGAGCAGTGT
TCTTCTGAAGGCAGAGGGTTTTCACTCTCCCAGGCATGACATTTTTAAGGCTTCCTAGCTGTGCTGTCATC
ATGACTCTGACCGAATTACAAAAGTTGTAAATTACACGTATAAGTCGACGAGGAAGATTGATGTCCCAAAC
GGTCAAGCAAGATTGTATCTCTTTCTGCTTTTGTGTACCTTCAGTATTTTTCCGGTTGTAGCCCAATACCA
TTCTCTCTTACTCAACAGATGTTCGTCTCATTTTTTCAGCTAATTCTTTTCTCACTTCAATGTGTTTTTCT
AAATTTTGCACTTCATGTGAAAATGTGAGTACCCTTTCCATGTGAACATTTTTAAAATAAATATTTACAAG
AGGAGAGAATAATTTTCCTATCCAAAGACAATTCCTATTTCTTTAAAATACACATTTACTGGTAAGTATTT
TTACATATATTTAAATTAAAAATAATAACATTCCTTCATACACACGAGCTATTTCAATAAATTAGGTACTT
CACAGATTTATTTTCATTAATTAATGAACGAAAGTAACTGGTATTTATAAGAAATATAACATTGTGTTTTA
AATAGTCTTAAGCACAGAATTTAAAATAAAGTTTACCTCCATTACAGACAAGAAAACAAAAAATTATCGGC
CTTATAAATTTTAGTATGAGTACTTCTAAGAAGGAATACATTACATGGGAAACTGTCTTAATATTTTCATT
ATACCGTGCAGATTTCTAGAAAAATCGACAAGCAATAGTCCTGCAAAGAGAATTCACATACCAACAAAGGA
CTTTATTAGTGCAAATTCATTTGAATATTTACAAGCATATATGATAGTGCATTTCGATGCAACAGTATGTC
ATGTTTTTTCATTAGTACTTTTAATGGAGTTTTCTTTTGAATTGAGTGAAGTTGTGTAAGATGCACTGTTT
GCAACAGCAAGAAAAACAACTCTATTATGTCTAGGAAAGACACAGAGAGTTTCTGTGACAAAGAGAGTTTC
TGTGTCTTTCCTAGATATGAGGACTTTGATAAAAAAATAAAAATATCACTTGAAGGACTGAACACTGTATT
TACACTAATTATACAAAATTCAGGGTATCCACATTCAAACATAGAGTTGTAGGATCTGCAGCATCACAAAT
TTAGGGAAAAGATGAATATAAGCATTAGAATGAAGCAGATTAGAAAACAAGTAGCTAGTGGTATGAAGAAA
AGTGTTAGATATTTATCCTCATGGTCTTGGTAGGAGCTGTGGAATTCTATAATTCTGAAAAAAAAAAAGGT
TTCTATCTGAATGATCTATGTAAACAATTTAAGTATAATTTGGAAGCCTAGGGTGGCAGATATTTTTATCC
ATCATAACTAAAGCTCCTTTCTCCTTCAGCAACTAAAGAATTTACCGAAAGTACTTTTCCTAAAGCAGAAA
TGACCTCAAATTATTACATAGGTATTTGGCCCTGATACTCCTATTGTGGTAAGTAGTAAAATGCCATAAGT
TCTGAGAATATTAAATGTACTAGTTGTCCTATCACAGGGAATTATCTGAAATAATGAATACTGGTCAGGGC
CGTTAAAGCATAGCTTCCTTTAAAATACAGAAAATCTTTCATCTTTAAGAATTTGATTACCCTTAATATAA
ATAAATTTAAAGTTTTCACAAAAAATTGCAAATACAAAGTAACAATGAAAGAGATAACACTGGAACAAAGA
GCTCTATTATATATGATTTTTTTGTTAATTACATAACAAAAGTTTTTAAAAAACCTTTATTATTCCATTTA
AATATGGTATTCATTTTTTTAATTTGTCTTTGGTAAA

We claim:

1. A double stranded ribonucleic acid (dsRNA) agent for inhibiting expression of LRRK2, wherein the dsRNA agent comprises a sense strand and an antisense strand forming a double stranded region,
wherein the antisense strand comprises a region of complementarity to an mRNA encoding LRRK2, and wherein the region of complementarity comprises at least 15 contiguous nucleotides differing by no more than 3 nucleotides from any one of the antisense nucleotide sequences in any one of Tables 3-7.

2. A double stranded ribonucleic acid (dsRNA) agent for inhibiting expression of LRRK2, wherein the dsRNA agent comprises a sense strand and an antisense strand forming a double stranded region,
wherein the sense strand comprises at least 15 contiguous nucleotides differing by no more than 3 nucleotides from the nucleotide sequence of SEQ ID NO: 1 or 1808 and the antisense strand comprises at least 15 contiguous nucleotides differing by no more than 3 nucleotides from the nucleotide sequence of SEQ ID NO: 2 or 1809.

3. A double stranded ribonucleic acid (dsRNA) agent for inhibiting expression of LRRK2, wherein the dsRNA agent comprises a sense strand and an antisense strand forming a double stranded region,
wherein the antisense strand comprises a region of complementarity to an mRNA encoding LRRK2, and wherein the region of complementarity comprises at least 15 contiguous nucleotides differing by no more than 3 nucleotides from the nucleotide sequence of SEQ ID NO: 2 or 1809.

4. The dsRNA agent of any one of claims 1-3, wherein the sense strand comprises at least 15 contiguous nucleotides differing by no more than three nucleotides from any one of the nucleotide sequence of nucleotides 1458-1478, 1484-1504, 1761-1781, 1950-1970, 2076-2096, 2094-2114, 2212-2232, 2213-2233, 2268-2288, 2431-2451, 2529-2549, 2565-2585, 2566-2586, 2569-2589, 2583-2603, 2605-2625, 2657-2677,2764-2784,2867-2887,2881-2901,2883-2903,3022-3042, 3198-3218, 3330-3350, 3348-3368, 3395-3415, 3629-3649, 3630-3650, 3712-3732, 3713-3733, 3715-3735, 3717-3737, 3720-3740, 3727-3747, 3796-3816, 3800-3820, 3822-3842, 3829-3849, 3875-3895, 3971-3991, 4130-4150, 4443-4463, 4447-4467, 4449-4469, 4478-4498, 4488-4508, 4619-4639, 4652-4672, 4868-4888, 4950-4970, 4970-4990, 4971-4991, 4972-4992, 5092-5112, 5202-5222, 5226-5246, 5232-5252, 5233-5253, 5273-5293, 5318-5338, 5367-5387, 5368-5388, 5370-5390, 5373-5393, 5425-5445, 5443-5463, 5457-5477, 5461-5481, 5471-5491, 5475-5495, 5501-5521, 5557-5577, 5640-5660, 5646-5666, 5659-5679, 5674-5694, 5675-5695, 5676-5696, 5682-5702, 5684-5704, 5722-5742, 5725-5745, 5778-5798, 5779-5799, 5793-5813, 5964-5984, 5965-5985, 5984-6004, 6029-6049, 6092-6112, 6093-6113, 6094-6114, 6096-6116, 6127-6147, 6143-6163, 6165-6185, 6172-6192, 6173-6193, 6174-6194, 6175-6195, 6198-6218, 6319-6339, 6339-6359, 6418-6438, 6531-6551, 6536-6556, 6541-6561, 6573-6593, 6662-6682, 6730-6750, 6740-6760, 6742-6762, 6786-6806, 6791-6811, 6803-6823, 6804-6824, 6805-6825, 6807-6827, 6810-6830, 6811-6831, 6812-6832, 6818-6838, 6872-6892, 7004-7024, 7018-7038, 7020-7040, 7027-7047, 7028-7048, 7085-7105, 7103-7123, 7115-7135, 7121-7141, 7127-7147, 7242-7262, 7348-7368, 7397-7417, 7404-7424, 7405-7425, 7421-7441, 7443-7463, 7444-7464, 7445-7465, 7493-7513, 7535-7555, 7538-7558, 7539-7559, 7593-7613, 7629-7649, 7637-7657, 7638-7658, 7639-7659, 7671-7691, 7727-7747, 7729-7749, 8134-8154, 8135-8155, 1484-1504, 1488-1508, 1755-1775, 1761-1781, 1905-1925, 1945-1965, 1950-1970, 2029-2049,2207-2227,2212-2232,2213-2233,2431-2451,2529-2549, 2565-2585, 2569-2589, 2648-2668, 2764-2784, 2874-2894, 2881-2901, 3051-3071, 3193-3213, 3198-3218, 3208-3228, 3330-3350, 3331-3351, 3350-3370, 3380-3400, 3390-3410, 3395-3415, 3573-3593, 3622-3642, 3632-3652, 3712-3732, 3715-3735, 3717-3737, 3718-3738, 3740-3760, 3795-3815, 3806-3826, 3829-3849, 3830-3850, 3938-3958, 3950-3970, 3971-3991, 4367-4387, 4376-4396, 4444-4464,4446-4466,4447-4467, 4551-4571,4554-4574,4704-4724, 4834-4854, 4839-4859, 4925-4945, 4970-4990, 4971-4991, 4972-4992, 5058-5078, 5092-5112, 5128-5148, 5196-5216, 5226-5246, 5275-5295, 5322-5342, 5349-5369, 5352-5372, 5365-5385, 5367-5387, 5368-5388, 5370-5390, 5373-5393, 5461-5481, 5475-5495, 5482-5502, 5515-5535, 5516-5536, 5541-5561, 5557-5577, 5607-5627, 5635-5655, 5641-5661, 5643-5663, 5644-5664, 5646-5666, 5655-5675, 5659-5679, 5660-5680, 5671-5691, 5674-5694, 5682-5702, 5683-5703, 5684-5704, 5721-5741, 5757-5777, 5763-5783, 5772-5792, 5773-5793, 5776-5796, 5777-5797, 5778-5798, 5779-5799, 5793-5813, 5794-5814, 5964-5984, 5965-5985, 5966-5986, 5980-6000, 5984-6004, 6029-6049, 6030-6050, 6071-6091, 6092-6112, 6093-6113, 6095-6115, 6129-6149, 6135-6155, 6136-6156,6142-6162, 6145-6165, 6171-6191, 6172-6192, 6174-6194, 6175-6195, 6178-6198, 6180-6200, 6196-6216, 6197-6217, 6198-6218, 6344-6364, 6355-6375, 6520-6540, 6536-6556, 6538-6558, 6539-6559, 6541-6561, 6723-6743, 6724-6744, 6729-6749, 6730-6750, 6737-6757, 6740-6760, 6742-6762, 6743-6763, 6786-6806, 6787-6807, 6791-6811, 6793-6813, 6794-6814, 6803-6823, 6805-6825, 6806-6826, 6807-6827, 6808-6828, 6810-6830, 6811-6831, 6812-6832, 6813-6833, 6814-6834, 6818-6838, 6828-6848, 6829-6849, 6834-6854, 6872-6892, 6918-6938, 6919-6939, 6920-6940, 6922-6942, 6989-7009, 7004-7024, 7012-7032, 7023-7043, 7035-7055, 7036-7056, 7041-7061, 7085-7105, 7103-7123, 7114-7134, 7116-7136, 7121-7141, 7129-7149, 7146-7166, 7149-7169, 7242-7262, 7247-7267, 7303-7323, 7348-7368, 7353-7373, 7397-7417, 7404-7424, 7405-7425, 7443-7463, 7493-7513, 7533-7553, 7538-7558, 7539-7559, 7593-7613, 7627-7647, 7629-7649, 7727-7747, 8005-8025, 8007-8027 and 8134-8154 of SEQ ID NO: 1, and the antisense strand comprises at least 15 contiguous nucleotides from the corresponding nucleotide sequence of SEQ ID NO: 2.

5. The dsRNA agent of any one of claims 1-4, wherein the antisense strand comprises at least contiguous nucleotides differing by no more than three nucleotides from any one of the antisense strand nucleotide sequences of a duplex selected from the group consisting of AD-1624152, AD-1624178, AD-1624412, AD-1624595, AD-1624721, AD-1624739, AD-1624856, AD-1624857, AD-1624894, AD-1625057, AD-1625155, AD-1625191, AD-1625192, AD-1625195, AD-1625209, AD-1625230, AD-1625282, AD-1625389, AD-1625485, AD-1625499, AD-1625501, AD-1625610, AD-1625786, AD-1625910, AD-1625928, AD-1625975, AD-1626183, AD-1626184, AD-1626265, AD-1626266, AD-1626268, AD-1626270, AD-1626273, AD-1626280, AD-1626349, AD-1626353, AD-1626375, AD-1626382, AD-1626428, AD-1626524, AD-1626636, AD-1626921, AD-1626925, AD-1626927, AD-1626936, AD-1626946, AD-1627077, AD-1627110, AD-1627308, AD-1627390, AD-1627410, AD-1627411, AD-1627412, AD-1627511, AD, 1627601, AD-1627625, AD-1627631, AD-1627632, AD-1627672, AD-1627717, AD-1627766, AD-1627767, AD-1627769, AD-1627772, AD-1627820, AD-1627838, AD-1627852, AD-1627856, AD-1627866, AD-1627870, AD-1627896, AD-1627952, AD-1628008, AD-1628014, AD-1628027, AD-1628042, AD-1628043, AD-1628044, AD-1628050, AD-1628052, AD-1628070, AD-1628073, AD-1628118, AD-1628119, AD-1628133, AD-1628253, AD-1628254, AD-1628273, AD-1628318, AD-1628381, AD-1628382, AD-1628383, AD-1628385, AD-1628396, AD-1628412, AD-1628434, AD-1628441, AD-1628442, AD-1628443, AD-1628444, AD-1628467, AD-1628570, AD-1628590, AD-1628668, AD-1628754, AD-1628759, AD-1628764, AD-1628794, AD-1628883, AD-1628951, AD-1628961, AD-1628963, AD-1629007, AD-1629012, AD-1629024, AD-1629025, AD-1629026, AD-1629028, AD-1629031, AD-1629032, AD-1629033, AD-1629039, AD-1629092, AD-1629200, AD-1629214, AD-1629216, AD-1629223, AD-1629224, AD-1629263, AD-1629280, AD-1629292, AD-1629298, AD-1629304, AD-1629419, AD-1629524, AD-1629573, AD-1629580, AD-1629581, AD-1629597, AD-1629619, AD-1629620, AD-1629621, AD-1629665, AD-1629707, AD-1629710, AD-1629711, AD-1629763, AD-1629799, AD-1629807, AD-1629808, AD-1629809, AD-1629838, AD-1629876, AD-1629878, AD-1630135, AD-1630136, AD-1631019, AD-1631020, AD-1631021, AD-1631022, AD-1631023, AD-1631024, AD-1631025, AD-1631026, AD-1631027, AD-1631028, AD-1631029, AD-1631030, AD-1631031, AD-1631032, AD-1631033, AD-1631034, AD-1631035, AD-1631036, AD-1631037, AD-1631038, AD-1631039, AD-1631040, AD-1631041, AD-1631042, AD-1631043, AD-1631044, AD-1631045, AD-1631046, AD-1631047, AD-1631048, AD-1631049, AD-1631050, AD-1631051, AD-1631052, AD-1631053, AD-1631054, AD-1631055, AD-1631056, AD-1631057, AD-1631058, AD-1631059, AD-1631060, AD-1631061, AD-1631062, AD-1631063, AD-1631064, AD-1631065, AD-1631066, AD-1631067, AD-1631068, AD-1631069, AD-1631070, AD-1631071, AD-1631072, AD-1631073, AD-1631074, AD-1631075, AD-1631076, AD-1631077, AD-1631078, AD-1631079, AD-1631080, AD-1631081, AD-1631082, AD-1631083, AD-1631084, AD-1631085, AD-1631086, AD-1631087, AD-1631088, AD-1631089, AD-1631090, AD-1631091, AD-1631092, AD-1631093, AD-1631094, AD-1631095, AD-1631096, AD-1631097, AD-1631098, AD-1631099, AD-1631100, AD-1631101, AD-1631102, AD-1631103, AD-1631104, AD-1631105, AD-1631106, AD-1631107, AD-1631108, AD-1631109, AD-1631110, AD-1631111, AD-1631112, AD-1631113, AD-1631114, AD-1631115, AD-1631116, AD-1631117, AD-1631118, AD-1631119, AD-1631120, AD-1631121, AD-1631122, AD-1631123, AD-1631124, AD-1631125, AD-1631126, AD-1631127, AD-1631128, AD-1631129, AD-1631130, AD-1631131, AD-1631132, AD-1631133, AD-1631134, AD-1631135, AD-1631136, AD-1631137, AD-1631138, AD-1631139, AD-1631140, AD-1631141, AD-1631142, AD-1631143, AD-1631144, AD-1631145, AD-1631146, AD-1631147, AD-1631148, AD-1631149, AD-1631150, AD-1631151, AD-1631152, AD-1631153, AD-1631154, AD-1631155, AD-1631156, AD-1631157, AD-1631158, AD-1631159, AD-1631160, AD-1631161, AD-1631162, AD-1631163, AD-1631164, AD-1631165, AD-1631166, AD-1631167, AD-1631168, AD-1631169, AD-1631170, AD-1631171, AD-1631172, AD-1631173, AD-1631174, AD-1631175, AD-1631176, AD-1631177, AD-1631178, AD-1631179, AD-1631180, AD-1631181, AD-1631182, AD-1631183, AD-1631184, AD-1631185, AD-1631186, AD-1631187, AD-1631188, AD-1631189, AD-1631190, AD-1631191, AD-1631192, AD-1631193, AD-1631194, AD-1631195, AD-1631196, AD-1631197, AD-1631198, AD-1631199, AD-1631200, AD-1631201, AD-1631202, AD-1631203, AD-1631204, AD-1631205, AD-1631206, AD-1631207, AD-1631208, AD-1631209, AD-1631210, AD-1631211, AD-1631212, AD-1631213, AD-1631214, AD-1631215, AD-1631216, AD-1631217, AD-1631218, AD-1631219, AD-1631220, AD-1631221, AD-1807334, AD-1807335, AD-1807336, AD-1807337, AD-1807338, AD-1807339, AD-1807340, AD-1807341, AD-1807342, AD-1807343, AD-1807344, AD-1807345, AD-1807346, AD-1807347, AD-1807348, AD-1807349, AD-1807350, AD-1807351, AD-1807352, AD-1807353, AD-1807354, AD-1807355, AD-1807356, AD-1807357, AD-1807358, AD-1807359, AD-1807360, AD-1807361, AD-1807362, AD-1807363, AD-1807364, AD-1807365, AD-1807366, AD-1807367, AD-1807368, AD-1807369, AD-1807370, AD-1807371, AD-1807372, AD-1807373, AD-1807374, AD-1807375, AD-1807376, AD-1807377, AD-1807378, AD-1807379, AD-1807380, AD-1807381, AD-1807382, AD-1807383, AD-1807384, AD-1807385, AD-1807386, AD-1807387, AD-1807388, AD-1807389, AD-1807390, AD-1807391, AD-1807392, AD-1807393, AD-1807394, AD-1807395, AD-1807396, AD-1807397, AD-1807398, AD-1807399, AD-1807400, AD-1807401, AD-1807402, AD-1807403, AD-1807404, AD-1807405, AD-1807406, AD-1807407, AD-1807408, AD-1807409, AD-1807410, AD-1807411, AD-1807412, AD-1807413, AD-1807414, AD-1807415, AD-1807416, AD-1807417, AD-1807418, AD-1807419, AD-1807420, AD-1807421, AD-1807422, and AD-1807423.

6. The dsRNA agent of any one of claims 2-3, wherein the sense strand comprises at least 15 contiguous nucleotides differing by no more than three nucleotides from any one of the nucleotide sequence of nucleotides 212-232, 238-258, 515-535, 704-724, 830-850, 848-868, 966-986, 967-987, 1022-1042, 1185-1205, 1283-1303, 1319-1339, 1320-1340, 1323-1343, 1337-1357, 1359-1379, 1411-1431, 1518-1538, 1621-1641, 1635-1655, 1637-1657, 1776-1796, 1952-1972, 2084-2104, 2102-2122, 2149-2169, 2383-2403, 2384-2404, 2466-2486, 2467-2487, 2469-2489, 2471-2491, 2474-2494, 2481-2501, 2550-2570, 2554-2574, 2576-2596, 2583-2603, 2629-2649, 2725-2745, 2884-2904, 3197-3217, 3201-3221, 3203-3223, 3232-3252, 3242-3262, 3373-3393, 3406-3426, 3622-3642, 3704-3724, 3724-3744, 3725-3745, 3726-3746, 3846-3866, 3956-3976, 3980-4000, 3986-4006, 3987-4007, 4027-4047, 4072-4092, 4121-4141, 4122-4142, 4124-4144, 4127-4147, 4179-4199, 4197-4217, 4211-4231, 4215-4235, 4225-4245, 4229-4249, 4255-4275, 4311-4331, 4394-4414, 4400-4420, 4413-4433, 4428-4448, 4429-4449, 4430-4450, 4436-4456, 4438-4458, 4476-4496, 4479-4499, 4532-4552, 4533-4553, 4547-4567, 4718-4738, 4719-4739, 4738-4758, 4783-4803, 4846-4866, 4847-4867, 4848-4868, 4850-4870, 4881-4901, 4897-4917, 4919-4939, 4926-4946, 4927-4947, 4928-4948, 4929-4949, 4952-4972, 5073-5093, 5093-5113, 5172-5192, 5285-5305, 5290-5310, 5295-5315, 5327-5347, 5416-5436, 5484-5504, 5494-5514, 5496-5516, 5540-5560, 5545-5565, 5557-5577, 5558-5578, 5559-5579, 5561-5581, 5564-5584, 5565-5585, 5566-5586, 5572-5592, 5626-5646, 5758-5778, 5772-5792, 5774-5794, 5781-5801, 5782-5802, 5839-5859, 5857-5877, 5869-5889, 5875-5895, 5881-5901, 5996-6016, 6102-6122, 6151-6171, 6158-6178, 6159-6179, 6175-6195, 6197-6217, 6198-6218, 6199-6219, 6247-6267, 6289-6309, 6292-6312, 6293-6313, 6347-6367, 6383-6403, 6391-6411, 6392-6412, 6393-6413, 6425-6445, 6481-6501, 6483-6503, 6888-6908 and 6889-6909 of SEQ ID NO: 1808, and the antisense strand comprises at least 15 contiguous nucleotides from the corresponding nucleotide sequence of SEQ ID NO: 1809.

7. The dsRNA agent of any one of claims 2-3 or 6, wherein the antisense strand comprises at least 15 contiguous nucleotides differing by no more than three nucleotides from any one of the antisense strand nucleotide sequences of a duplex selected from the group consisting of AD-1624152, AD-1624178, AD-1624412, AD-1624595, AD-1624721, AD-1624739, AD-1624856, AD-1624857, AD-1624894, AD-1625057, AD-1625155, AD-1625191, AD-1625192, AD-1625195, AD-1625209, AD-1625230, AD-1625282, AD-1625389, AD-1625485, AD-1625499, AD-1625501, AD-1625610, AD-1625786, AD-1625910, AD-1625928, AD-1625975, AD-1626183, AD-1626184, AD-1626265, AD-1626266, AD-1626268, AD-1626270, AD-1626273, AD-1626280, AD-1626349, AD-1626353, AD-1626375, AD-1626382, AD-1626428, AD-1626524, AD-1626636, AD-1626921, AD-1626925, AD-1626927, AD-1626936, AD-1626946, AD-1627077, AD-1627110, AD-1627308, AD-1627390, AD-1627410, AD-1627411, AD-1627412, AD-1627511, AD, 1627601, AD-1627625, AD-1627631, AD-1627632, AD-1627672, AD-1627717, AD-1627766, AD-1627767, AD-1627769, AD-1627772, AD-1627820, AD-1627838, AD-1627852, AD-1627856, AD-1627866, AD-1627870, AD-1627896, AD-1627952, AD-1628008, AD-1628014, AD-1628027, AD-1628042, AD-1628043, AD-1628044, AD-1628050, AD-1628052, AD-1628070, AD-1628073, AD-1628118, AD-1628119, AD-1628133, AD-1628253, AD-1628254, AD-1628273, AD-1628318, AD-1628381, AD-1628382, AD-1628383, AD-1628385, AD-1628396, AD-1628412, AD-1628434, AD-1628441, AD-1628442, AD-1628443, AD-1628444, AD-1628467, AD-1628570, AD-1628590, AD-1628668, AD-1628754, AD-1628759, AD-1628764, AD-1628794, AD-1628883, AD-1628951, AD-1628961, AD-1628963, AD-1629007, AD-1629012, AD-1629024, AD-1629025, AD-1629026, AD-1629028, AD-1629031, AD-1629032, AD-1629033, AD-1629039, AD-1629092, AD-1629200, AD-1629214, AD-1629216, AD-1629223, AD-1629224, AD-1629263, AD-1629280, AD-1629292, AD-1629298, AD-1629304, AD-1629419, AD-1629524, AD-1629573, AD-1629580, AD-1629581, AD-1629597, AD-1629619, AD-1629620, AD-1629621, AD-1629665, AD-1629707, AD-1629710, AD-1629711, AD-1629763, AD-1629799, AD-1629807, AD-1629808, AD-1629809, AD-1629838, AD-1629876, AD-1629878, AD-1630135 and AD-1630136.

8. The dsRNA agent of claim 2 or 3, wherein the nucleotide sequence of the sense and antisense strand comprise any one of the sense and antisense strand nucleotide sequences in any one of Tables 3-7.

9. The dsRNA agent of any one of claims 1-8, wherein the sense strand, the antisense strand, or both the sense strand and the antisense strand is conjugated to one or more lipophilic moieties.

10. The dsRNA agent of claim 9, wherein the lipophilic moiety is conjugated to one or more internal positions in the double stranded region of the dsRNA agent.

11. The dsRNA agent of claim 9 or 10, wherein the lipophilic moiety is conjugated via a linker or carrier.

12. The dsRNA agent of any one of claims 9-11, wherein lipophilicity of the lipophilic moiety, measured by log Kow, exceeds 0.

13. The dsRNA agent of any one of claims 1-12, wherein the hydrophobicity of the double-stranded RNA agent, measured by the unbound fraction in a plasma protein binding assay of the double-stranded RNA agent, exceeds 0.2.

14. The dsRNA agent of claim 13, wherein the plasma protein binding assay is an electrophoretic mobility shift assay using human serum albumin protein.

15. The dsRNA agent of any one of claims 1-14, wherein the sense strand, the antisense strand, or both the sense strand and the antisense strand is conjugated to one or more Asialoglycoprotein receptor (ASGPR) ligands.

16. The dsRNA agent of claim 15, wherein the ASGPR ligand is attached to the 5′ end or 3′ end of the sense strand.

17. The dsRNA agent of claim 15, wherein the ASGPR ligand is attached to the 5′ end of the sense strand.

18. The dsRNA agent of claim 15, wherein the ASGPR ligand is attached to the 3′ end of the sense strand.

19. The dsRNA agent of any one of claims 15-18, wherein the ASGPR ligand comprises one or more GalNAc derivatives attached through a bivalent or trivalent branched linker.

20. The dsRNA agent of any one of claims 15-19, wherein the ASGPR ligand comprises:

[chemical structure]

21. The dsRNA agent of claim 15, wherein the ASGPR ligand is:

[chemical structure]

22. The dsRNA agent of any one of claims 1-14, wherein the dsRNA agent comprises at least one modified nucleotide.

23. The dsRNA agent of claim 22, wherein no more than five of the sense strand nucleotides and no more than five of the nucleotides of the antisense strand are unmodified nucleotides

24. The dsRNA agent of claim 22, wherein all of the nucleotides of the sense strand and all of the nucleotides of the antisense strand are modified nucleotides.

25. The dsRNA agent of any one of claims 22-24, wherein at least one of the modified nucleotides is selected from the group a deoxy-nucleotide, a 3′-terminal deoxythimidine (dT) nucleotide, a 2′-O-methyl modified nucleotide, a 2′-fluoro modified nucleotide, a 2′-deoxy-modified nucleotide, a locked nucleotide, an unlocked nucleotide, a conformationally restricted nucleotide, a constrained ethyl nucleotide, an abasic nucleotide, a 2′-amino-modified nucleotide, a 2′-O-allyl-modified nucleotide, 2′-C-alkyl-modified nucleotide, 2′-hydroxy-modified nucleotide, a 2′-methoxyethyl modified nucleotide, a 2′-O-alkyl-modified nucleotide, a morpholino nucleotide, a phosphoramidate, a non-natural base comprising nucleotide, a tetrahydropyran modified nucleotide, a 1,5-anhydrohexitol modified nucleotide, a cyclohexenyl modified nucleotide, a nucleotide comprising a 5′-phosphorothioate group, a nucleotide comprising a 5′-methylphosphonate group, a nucleotide comprising a 5′ phosphate or 5′ phosphate mimic, a nucleotide comprising vinyl phosphonate, a nucleotide comprising adenosine-glycol nucleic acid (GNA), a nucleotide comprising thymidine-glycol nucleic acid (GNA)S-Isomer, a nucleotide comprising 2-hydroxymethyl-tetrahydrofurane-5-phosphate, a nucleotide comprising 2′-deoxythymidine-3′phosphate, a nucleotide comprising 2′-deoxyguanosine-3′-phosphate, and a terminal nucleotide linked to a cholesteryl derivative and a dodecanoic acid bisdecylamide group; and combinations thereof.

26. The dsRNA agent of claim 25, wherein the modified nucleotide is selected from the group consisting of a 2′-deoxy-2′-fluoro modified nucleotide, a 2′-deoxy-modified nucleotide, 3′-terminal deoxythimidine nucleotides (dT), a locked nucleotide, an abasic nucleotide, a 2′-amino-modified nucleotide, a 2′-alkyl-modified nucleotide, a morpholino nucleotide, a phosphoramidate, and a non-natural base comprising nucleotide.

27. The dsRNA agent of claim 25, wherein the modified nucleotide comprises a short sequence of 3′-terminal deoxythimidine nucleotides (dT).

28. The dsRNA agent of claim 25, wherein the modifications on the nucleotides are 2′-O-methyl, GNA and 2′fluoro modifications.

29. The dsRNA agent of any one of claims 1-28, further comprising at least one phosphorothioate internucleotide linkage.

30. The dsRNA agent of claim 29, wherein the dsRNA agent comprises 6-8 phosphorothioate internucleotide linkages.

31. The dsRNA agent of any one of claims 1-30, wherein each strand is no more than 30 nucleotides in length.

32. The dsRNA agent of any one of claims 1-31, wherein at least one strand comprises a 3′ overhang of at least 1 nucleotide.

33. The dsRNA agent of any one of claims 1-32, wherein at least one strand comprises a 3′ overhang of at least 2 nucleotides.

34. The dsRNA agent of any one of claims 1-33, wherein the double stranded region is 15-30 nucleotide pairs in length.

35. The dsRNA agent of claim 34, wherein the double stranded region is 17-23 nucleotide pairs in length.

36. The dsRNA agent of claim 34, wherein the double stranded region is 17-25 nucleotide pairs in length.

37. The dsRNA agent of claim 34, wherein the double stranded region is 23-27 nucleotide pairs in length.

38. The dsRNA agent of claim 34, wherein the double stranded region is 19-21 nucleotide pairs in length.

39. The dsRNA agent of claim 34, wherein the double stranded region is 21-23 nucleotide pairs in length.

40. The dsRNA agent of any one of claims 1-39, wherein each strand has 19-30 nucleotides.

41. The dsRNA agent of any one of claims 1-39, wherein each strand has 19-23 nucleotides.

42. The dsRNA agent of any one of claims 1-39, wherein each strand has 21-23 nucleotides.

43. The dsRNA agent of any one of claims 10-42, wherein one or more lipophilic moieties are conjugated to one or more internal positions on at least one strand.

44. The dsRNA agent of claim 43, wherein the one or more lipophilic moieties are conjugated to one or more internal positions on at least one strand via a linker or carrier.

45. The dsRNA agent of claim 44, wherein the internal positions include all positions except the terminal two positions from each end of the at least one strand.

46. The dsRNA agent of claim 44, wherein the internal positions include all positions except the terminal three positions from each end of the at least one strand.

47. The dsRNA agent of claim 44-46, wherein the internal positions exclude a cleavage site region of the sense strand.

48. The dsRNA agent of claim 47, wherein the internal positions include all positions except positions 9-12, counting from the 5′-end of the sense strand.

49. The dsRNA agent of claim 47, wherein the internal positions include all positions except positions 11-13, counting from the 3′-end of the sense strand.

50. The dsRNA agent of claim 44-46, wherein the internal positions exclude a cleavage site region of the antisense strand.

51. The dsRNA agent of claim 50, wherein the internal positions include all positions except positions 12-14, counting from the 5′-end of the antisense strand.

52. The dsRNA agent of claim 44-46, wherein the internal positions include all positions except positions 11-13 on the sense strand, counting from the 3′-end, and positions 12-14 on the antisense strand, counting from the 5′-end.

53. The dsRNA agent of any one of claims 10-52, wherein the one or more lipophilic moieties are conjugated to one or more of the internal positions selected from the group consisting of positions 4-8 and 13-18 on the sense strand, and positions 6-10 and 15-18 on the antisense strand, counting from the 5′end of each strand.

54. The dsRNA agent of claim 53, wherein the one or more lipophilic moieties are conjugated to one or more of the internal positions selected from the group consisting of positions 5, 6, 7, 15, and 17 on the sense strand, and positions 15 and 17 on the antisense strand, counting from the 5′-end of each strand.

55. The dsRNA agent of claim 10, wherein the internal positions in the double stranded region exclude a cleavage site region of the sense strand.

56. The dsRNA agent of any one of claims 9-55, wherein the sense strand is 21 nucleotides in length, the antisense strand is 23 nucleotides in length, and the lipophilic moiety is conjugated to position 21, position 20, position 15, position 1, position 7, position 6, or position 2 of the sense strand or position 16 of the antisense strand.

57. The dsRNA agent of claim 56, wherein the lipophilic moiety is conjugated to position 21, position 20, position 15, position 1, or position 7 of the sense strand.

58. The dsRNA agent of claim 56, wherein the lipophilic moiety is conjugated to position 21, position 20, or position 15 of the sense strand.

59. The dsRNA agent of claim 56, wherein the lipophilic moiety is conjugated to position 20 or position 15 of the sense strand.

60. The dsRNA agent of claim 56, wherein the lipophilic moiety is conjugated to position 16 of the antisense strand.

61. The dsRNA agent of any one of claims 9-60, wherein the lipophilic moiety is an aliphatic, alicyclic, or polyalicyclic compound.

62. The dsRNA agent of claim 61, wherein the lipophilic moiety is selected from the group consisting of lipid, cholesterol, retinoic acid, cholic acid, adamantane acetic acid, 1-pyrene butyric acid, dihydrotestosterone, 1,3-bis-O(hexadecyl)glycerol, geranyloxyhexyanol, hexadecylglycerol, borneol, menthol, 1,3-propanediol, heptadecyl group, palmitic acid, myristic acid, O3-(oleoyl) lithocholic acid, O3-(oleoyl)cholenic acid, dimethoxytrityl, or phenoxazine.

63. The dsRNA agent of claim 61, wherein the lipophilic moiety contains a saturated or unsaturated C4-C30 hydrocarbon chain, and an optional functional group selected from the group consisting of hydroxyl, amine, carboxylic acid, sulfonate, phosphate, thiol, azide, and alkyne.

64. The dsRNA agent of claim 63, wherein the lipophilic moiety contains a saturated or unsaturated C6-C18 hydrocarbon chain.

65. The dsRNA agent of claim 63, wherein the lipophilic moiety contains a saturated or unsaturated C16 hydrocarbon chain.

66. The dsRNA agent of claim 65, wherein the saturated or unsaturated C16 hydrocarbon chain is conjugated to position 6, counting from the 5′-end of the strand.

67. The dsRNA agent of any one of claims 9-66, wherein the lipophilic moiety is conjugated via a carrier that replaces one or more nucleotide(s) in the internal position(s) or the double stranded region.

68. The dsRNA agent of claim 67, wherein the carrier is a cyclic group selected from the group consisting of pyrrolidinyl, pyrazolinyl, pyrazolidinyl, imidazolinyl, imidazolidinyl, piperidinyl, piperazinyl, [1,3]dioxolanyl, oxazolidinyl, isoxazolidinyl, morpholinyl, thiazolidinyl, isothiazolidinyl, quinoxalinyl, pyridazinonyl, tetrahydrofuranyl, and decalinyl; or is an acyclic moiety based on a serinol backbone or a diethanolamine backbone.

69. The dsRNA agent of any one of claims 9-66, wherein the lipophilic moiety is conjugated to the double-stranded iRNA agent via a linker containing an ether, thioether, urea, carbonate, amine, amide, maleimide-thioether, disulfide, phosphodiester, sulfonamide linkage, a product of a click reaction, or carbamate.

70. The double-stranded iRNA agent of any one of claims 9-69, wherein the lipophilic moiety is conjugated to a nucleobase, sugar moiety, or internucleosidic linkage.

71. The dsRNA agent of any one of claims 9-70, wherein the lipophilic moeity or targeting ligand is conjugated via a bio-cleavable linker selected from the group consisting of DNA, RNA, disulfide, amide, functionalized monosaccharides or oligosaccharides of galactosamine, glucosamine, glucose, galactose, mannose, and combinations thereof.

72. The dsRNA agent of any one of claims 9-71, wherein the 3′ end of the sense strand is protected via an end cap which is a cyclic group having an amine, said cyclic group being selected from the group consisting of pyrrolidinyl, pyrazolinyl, pyrazolidinyl, imidazolinyl, imidazolidinyl, piperidinyl, piperazinyl, [1,3]dioxolanyl, oxazolidinyl, isoxazolidinyl, morpholinyl, thiazolidinyl, isothiazolidinyl, quinoxalinyl, pyridazinonyl, tetrahydrofuranyl, and decalinyl.

73. The dsRNA agent of any one of claims 9-70, further comprising a targeting ligand that targets a liver tissue.

74. The dsRNA agent of any one of claims 9-70, further comprising a targeting ligand that targets a neuronal cell.

75. The dsRNA agent of any one of claims 9-70, further comprising a targeting ligand that targets any ocular cell.

76. The dsRNA agent of claim 73, wherein the targeting ligand is a GalNAc conjugate.

77. The dsRNA agent of any one of claims 1-76 further comprising
a terminal, chiral modification occurring at the first internucleotide linkage at the 3′ end of the antisense strand, having the linkage phosphorus atom in Sp configuration,
a terminal, chiral modification occurring at the first internucleotide linkage at the 5′ end of the antisense strand, having the linkage phosphorus atom in Rp configuration, and
a terminal, chiral modification occurring at the first internucleotide linkage at the 5′ end of the sense strand, having the linkage phosphorus atom in either Rp configuration or Sp configuration.

78. The dsRNA agent of any one of claims 1-76 further comprising
a terminal, chiral modification occurring at the first and second internucleotide linkages at the 3′ end of the antisense strand, having the linkage phosphorus atom in Sp configuration,
a terminal, chiral modification occurring at the first internucleotide linkage at the 5′ end of the antisense strand, having the linkage phosphorus atom in Rp configuration, and
a terminal, chiral modification occurring at the first internucleotide linkage at the 5′ end of the sense strand, having the linkage phosphorus atom in either Rp or Sp configuration.

79. The dsRNA agent of any one of claims 1-76 further comprising
a terminal, chiral modification occurring at the first, second and third internucleotide linkages at the 3′ end of the antisense strand, having the linkage phosphorus atom in Sp configuration,
a terminal, chiral modification occurring at the first internucleotide linkage at the 5′ end of the antisense strand, having the linkage phosphorus atom in Rp configuration, and
a terminal, chiral modification occurring at the first internucleotide linkage at the 5′ end of the sense strand, having the linkage phosphorus atom in either Rp or Sp configuration.

80. The dsRNA agent of any one of claims 1-76 further comprising
a terminal, chiral modification occurring at the first, and second internucleotide linkages at the 3′ end of the antisense strand, having the linkage phosphorus atom in Sp configuration,
a terminal, chiral modification occurring at the third internucleotide linkages at the 3′ end of the antisense strand, having the linkage phosphorus atom in Rp configuration,
a terminal, chiral modification occurring at the first internucleotide linkage at the 5′ end of the antisense strand, having the linkage phosphorus atom in Rp configuration, and
a terminal, chiral modification occurring at the first internucleotide linkage at the 5′ end of the sense strand, having the linkage phosphorus atom in either Rp or Sp configuration.

81. The dsRNA agent of any one of claims 1-76 further comprising
a terminal, chiral modification occurring at the first, and second internucleotide linkages at the 3′ end of the antisense strand, having the linkage phosphorus atom in Sp configuration,
a terminal, chiral modification occurring at the first, and second internucleotide linkages at the 5′ end of the antisense strand, having the linkage phosphorus atom in Rp configuration, and
a terminal, chiral modification occurring at the first internucleotide linkage at the 5′ end of the sense strand, having the linkage phosphorus atom in either Rp or Sp configuration.

82. The dsRNA agent of any one of claims 1-81, further comprising a phosphate or phosphate mimic at the 5′-end of the antisense strand.

83. The dsRNA agent of claim 82, wherein the phosphate mimic is a 5′-vinyl phosphonate (VP).

84. The dsRNA agent of any one of claims 1-81, wherein the base pair at the 1 position of the 5′-end of the antisense strand of the duplex is an AU base pair.

85. The dsRNA agent of any one of claims 1-81, wherein the sense strand has a total of 21 nucleotides and the antisense strand has a total of 23 nucleotides.

86. The dsRNA of any one of claims 1-89, wherein the dsRNA agent targets a hotspot region of an mRNA encoding LRRK2.

87. The dsRNA agent of claim 86, wherein the hotspot region comprises any one of SEQ ID NOs: 2260-2288 of SEQ ID NO: 1 or any one of nucleotides 3620-3652, 3794-3849, 5194-5222, 5366-5393, 5423-5463, 5674-5704, 5720-5745, 6090-6114, 6125-6156, 6518-6561, 6721-6750, 6740-6763, 7016-7061, 7083-7123, 7112-7136, 7125-7169, 7346-7373, 7441-7465, 7591-7659, 7636-7659, 8132-8155, 3627-3650, 5194-5222, 5674-5702, 5720-5745, 6091-6114, 6529-6559, 7034-7061, 7441-7465, and 7636-7659 of SEQ ID NO: 1.

88. The dsRNA agent of claim 87, wherein the dsRNA agent is selected from the group consisting of AD-1627308, AD-1631049, AD-1631050, AD-1626349, AD-1626353, AD-1626375, AD-1626382, AD-1631080, AD-1807348, AD-1807393, AD-1631088, AD-1631089, AD-1631090, AD-1631108, AD-1807416, AD-1807371, AD-1627767, AD-1627769, AD-1627772, AD-1631109, AD-1631110, AD-1631111, AD-1627820, AD-1627838, AD-1628042, AD-1628043, AD-1628044, AD-1628050, AD-1628052, AD-1628070, AD-1631108, AD-1631109, AD-1631110, AD-1631111, AD-1807397, AD-1807352, AD-1628073, AD-1807374, AD-1807419, AD-1628381, AD-1628382, AD-1628383, AD-1631131, AD-1631132, AD-1631133, AD-1628396, AD-1807361, AD-1807406, AD-1631150, AD-1631151, AD-1631152, AD-1631153, AD-1631154, AD-1631155, AD-1631156, AD-1631157, AD-1631158, AD-1631160, AD-1631161, AD-1631162, AD-1807357, AD-1807402, AD-1628961, AD-1628963, AD-1629214, AD-1629216, AD-1629223, AD-1629224, AD-1629263, AD-1629280, AD-1631194, AD-1631195, AD-1631196, AD-1631197, AD-1807363, AD-1807408, AD-1629304, AD-1629524, AD-1631205, AD-1631206, AD-1807337, AD-1807354, AD-1807382, AD-1807399, AD-1629619, AD-1629620, AD-1629621, AD-1631210, AD-1807355, AD-1807377, AD-1807400, AD-1807422, AD-1629763, AD-1631215, AD-1631216, AD-1631217, AD-1807335, AD-1807336, AD-1807376, AD-1807380, AD-1807381, AD-1807421, AD-1630135, AD-1630136, AD-1631221, AD-1807369, AD-1807414, AD-1807364, AD-1807409, AD-1629808, and AD-1629809.

89. A dsRNA agent that targets a hotspot region of a myosin regulatory light chain interacting protein (LRRK2) mRNA.

90. A cell containing the dsRNA agent of any one of claims 1-89.

91. A pharmaceutical composition for inhibiting expression of a gene encoding LRRK2, comprising the dsRNA agent of any one of claims 1-89.

92. A pharmaceutical composition comprising the dsRNA agent of any one of claims 1-89 and a lipid formulation.

93. The pharmaceutical composition of claim 91 or 92, wherein dsRNA agent is in an unbuffered solution.

94. The pharmaceutical composition of claim 91, wherein the unbuffered solution is saline or water.

95. The pharmaceutical composition of claim 91 or 92, wherein said dsRNA agent is in a buffer solution.

96. The pharmaceutical composition of claim 95, wherein the buffer solution comprises acetate, citrate, prolamine, carbonate, or phosphate or any combination thereof.

97. The pharmaceutical composition of claim 95, wherein the buffer solution is phosphate buffered saline (PBS).

98. A method of inhibiting expression of a LRRK2 gene in a cell, the method comprising contacting the cell with the dsRNA agent of any one of claims 1-89, or the pharmaceutical composition of any one of claims 91-97, thereby inhibiting expression of the LRRK2 gene in the cell.

99. The method of claim 98, wherein the cell is within a subject.

100. The method of claim 99, wherein the subject is a human.

101. The method of claim 100, wherein the subject has a LRRK2-associated disorder.

102. The method of claim 101, wherein the LRRK2-associated disorder is a neurodegenerative disorder.

103. The method of claim 102, wherein the neurodegenerative disorder is a familial disorder.

104. The method of claim 102, wherein the neurodegenerative disorder is a sporadic disorder.

105. The method of claim 103 or 104, wherein the neurodegenerative disorder is Parkinson's disease.

106. The method of claim 101, wherein the LRRK2-associated disorder is an ocular disorder.

107. The method of any one of claims 98-106, wherein contacting the cell with the dsRNA agent inhibits the expression of LRRK2 by at least about 25%.

108. The method of any one of claims 98-107, wherein inhibiting expression of LRRK2 decreases LRRK2 protein level in serum of the subject by at least about 25%.

109. A method of treating a subject having a disorder that would benefit from reduction in LRRK2 expression, comprising administering to the subject a therapeutically effective amount of the dsRNA agent of any one of claims 1-89, or the pharmaceutical composition of any one of claims 91-97, thereby treating the subject having the disorder that would benefit from reduction in LRRK2 expression.

110. A method of preventing at least one symptom in a subject having a disorder that would benefit from reduction in LRRK2 expression, comprising administering to the subject a prophylactically effective amount of the dsRNA agent of any one of claims 1-89, or the pharmaceutical composition of any one of claims 91-97, thereby preventing at least one symptom in the subject having the disorder that would benefit from reduction in LRRK2 expression.

111. The method of claim 109 or 110, wherein the disorder is a LRRK2-associated disorder.

112. The method of claim 111, wherein the LRRK2-associated disorder is selected from the group consisting of Parkinson's disease, and ocular disorders.

113. The method of any one of claims 110-112, wherein the subject is human.

114. The method of claim 113, wherein the administration of the agent to the subject causes a decrease in LRRK2 protein accumulation.

115. The method of any one of claims 109-114, wherein the dsRNA agent is administered to the subject at a dose of about 0.01 mg/kg to about 50 mg/kg.

116. The method of any one of claims 109-115, wherein the dsRNA agent is administered to the subject intrathecally.

117. The method of any one of claims 109-116, further comprising determining the level of LRRK2 in a sample(s) from the subject.

118. The method of claim 117, wherein the level of LRRK2 in the subject sample(s) is a LRRK2 protein level in a blood, serum, or cerebrospinal fluid sample(s).

119. The method of any one of claims 109-118, further comprising administering to the subject an additional therapeutic agent.

120. A kit comprising the dsRNA agent of any one of claims 1-89 or the pharmaceutical composition of any one of claims 91-97.

121. A vial comprising the dsRNA agent of any one of claims 1-89 or the pharmaceutical composition of any one of claims 91-97.

122. A syringe comprising the dsRNA agent of any one of claims 1-89 or the pharmaceutical composition of any one of claims 91-97.

123. An intrathecal pump comprising the dsRNA agent of any one of claims 1-89 or the pharmaceutical composition of any one of claims 91-97.

The application's sequence listing, which the Patent Office published only in electronic form, follows.

SEQUENCE LISTING (2288 sequences)

SEQ ID NO: 1 - DNA, 9239 bp, Homo sapiens
ggggcccgcggggagcgctggctgcgggcggtgagctgagctcgcccccggggagctgtggccggcgcccctgccggttccctgagcagcggacgttcatgctgggagggcggcgggttggaagcaggtgccaccatggctagtggcagctgtcaggggtgcgaagaggacgaggaaactctgaagaagttgatagtcaggctgaacaatgtccaggaaggaaaacagatagaaacgctggtccaaatcctggaggatctgctggtgttcacgtactccgagcgcgcctccaagttatttcaaggcaaaaatatccatgtgcctctgttgatcgtcttggactcctatatgagagtcgcgagtgtgcagcaggtgggttggtcacttctgtgcaaattaatagaagtctgtccaggtacaatgcaaagcttaatgggaccccaggatgttggaaatgattgggaagtccttggtgttcaccaattgattcttaaaatgctaacagttcataatgccagtgtaaacttgtcagtgattggactgaagaccttagatctcctcctaacttcaggtaaaatcaccttgctgatattggatgaagaaagtgatattttcatgttaatttttgatgccatgcactcatttccagccaatgatgaagtccagaaacttggatgcaaagctttacatgtgctgtttgagagagtctcagaggagcaactgactgaatttgttgagaacaaagattatatgatattgttaagtgcgttaacaaattttaaagatgaagaggaaattgtgcttcatgtgctgcattgtttacattccctagcgattccttgcaataatgtggaagtcctcatgagtggcaatgtcaggtgttataatattgtggtggaagctatgaaagcattccctatgagtgaaagaattcaagaagtgagttgctgtttgctccataggcttacattaggtaattttttcaatatcctggtattaaacgaagtccatgagtttgtggtgaaagctgtgcagcagtacccagagaatgcagcattgcagatctcagcgctcagctgtttggccctcctcactgagactattttcttaaatcaagatttagaggaaaagaatgagaatcaagagaatgatgatgagggggaagaagataaattgttttggctggaagcctgttacaaagcattaacgtggcatagaaagaacaagcacgtgcaggaggccgcatgctgggcactaaataatctccttatgtaccaaaacagtttacatgagaagattggagatgaagatggccatttcccagctcatagggaagtgatgctctccatgctgatgcattcttcatcaaaggaagttttccaggcatctgcgaatgcattgtcaactctcttagaacaaaatgttaatttcagaaaaatactgttatcaaaaggaatacacctgaatgttttggagttaatgcagaagcatatacattctcctgaagtggctgaaagtggctgtaaaatgctaaatcatctttttgaaggaagcaacacttccctggatataatggcagcagtggtccccaaaatactaacagttatgaaacgtcatgagacatcattaccagtgcagctggaggcgcttcgagctattttacattttatagtgcctggcatgccagaagaatccagggaggatacagaatttcatcataagctaaatatggttaaaaaacagtgtttcaagaatgatattcacaaactggtcctagcagctttgaacaggttcattggaaatcctgggattcagaaatgtggattaaaagtaatttcttctattgtacattttcctgatgcattagagatgttatccctggaaggtgctatggattcagtgcttcacacactgcagatgtatccagatgaccaagaaattcagtgtctgggtttaagtcttataggatacttgattacaaagaagaatgtgttcataggaactggacatctgctggcaaaaattctggtttccagcttataccgatttaaggatgttgctgaaatacagactaaaggatttcagacaatcttagcaatcctcaaattgtcagcatctttttctaagctgctggtgcatcattcatttgacttagtaatattccatcaaatgtcttccaatatcatggaacaaaaggatcaacagtttctaaacctctgttgcaagtgttttgcaaaagtagctatggatgattacttaaaaaatgtgatgctagagagagcgtgtgatcagaataacagcatcatggttgaatgcttgcttctattgggagcagatgccaatcaagcaaaggagggatcttctttaatttgtcaggtatgtgagaaagagagcagtcccaaattggtggaactcttactgaatagtggatctcgtgaacaagatgtacgaaaagcgttgacgataagcattgggaaaggtgacagccagatcatcagcttgctcttaaggaggctggccctggatgtggccaacaatagcatttgccttggaggattttgtataggaaaagttgaaccttcttggcttggtcctttatttccagataagacttctaatttaaggaaacaaacaaatatagcatctacactagcaagaatggtgatcagatatcagatgaaaagtgctgtggaagaaggaacagcctcaggcagcgatggaaatttttctgaagatgtgctgtctaaatttgatgaatggacctttattcctgactcttctatggacagtgtgtttgctcaaagtgatgacctggatagtgaaggaagtgaaggctcatttcttgtgaaaaagaaatctaattcaattagtgtaggagaattttaccgagatgccgtattacagcgttgctcaccaaatttgcaaagacattccaattccttggggcccatttttgatcatgaagatttactgaagcgaaaaagaaaaatattatcttcagatgattcactcaggtcatcaaaacttcaatcccatatgaggcattcagacagcatttcttctctggcttctgagagagaatatattacatcactagacctttcagcaaatgaactaagagatattgatgccctaagccagaaatgctgtataagtgttcatttggagcatcttgaaaagctggagcttcaccagaatgcactcacgagctttccacaacagctatgtgaaactctgaagagtttgacacatttggacttgcacagtaataaatttacatcatttccttcttatttgttgaaaatgagttgtattgctaatcttgatgtctctcgaaatgacattggaccctcagtggttttagatcctacagtgaaatgtccaactctgaaacagtttaacctgtcatataaccagctgtcttttgtacctgagaacctcactgatgtggtagagaaactggagcagctcattttagaaggaaataaaatatcagggatatgctcccccttgagactgaaggaactgaagattttaaaccttagtaagaaccacatttcatccctatcagagaactttcttgaggcttgtcctaaagtggagagtttcagtgccagaatgaattttcttgctgctatgcctttcttgcctccttctatgacaatcctaaaattatctcagaacaaattttcctgtattccagaagcaattttaaatcttccacacttgcggtctttagatatgagcagcaatgatattcagtacctaccaggtcccgcacactggaaatctttgaacttaagggaactcttatttagccataatcagatcagcatcttggacttgagtgaaaaagcatatttatggtctagagtagagaaactgcatctttctcacaataaactgaaagagattcctcctgagattggctgtcttgaaaatctgacatctctggatgtcagttacaacttggaactaagatcctttcccaatgaaatggggaaattaagcaaaatatgggatcttcctttggatgaactgcatcttaactttgattttaaacatataggatgtaaagccaaagacatcataaggtttcttcaacagcgattaaaaaaggctgtgccttataaccgaatgaaacttatgattgtgggaaatactgggagtggtaaaaccaccttattgcagcaattaatgaaaaccaagaaatcagatcttggaatgcaaagtgccacagttggcatagatgtgaaagactggcctatccaaataagagacaaaagaaagagagatctcgtcctaaatgtgtgggattttgcaggtcgtgaggaattctatagtactcatccccattttatgacgcagcgagcattgtaccttgctgtctatgacctcagcaagggacaggctgaagttgatgccatgaagccttggctcttcaatataaaggctcgcgcttcttcttcccctgtgattctcgttggcacacatttggatgtttctgatgagaagcaacgcaaagcctgcatgagtaaaatcaccaaggaactcctgaataagcgagggttccctgccatacgagattaccactttgtgaatgccaccgaggaatctgatgctttggcaaaacttcggaaaaccatcataaacgagagccttaatttcaagatccgagatcagcttgttgttggacagctgattccagactgctatgtagaacttgaaaaaatcattttatcggagcgtaaaaatgtgccaattgaatttcccgtaattgaccggaaacgattattacaactagtgagagaaaatcagctgcagttagatgaaaatgagcttcctcacgcagttcactttctaaatgaatcaggagtccttcttcattttcaagacccagcactgcagttaagtgacttgtactttgtggaacccaagtggctttgtaaaatcatggcacagattttgacagtgaaagtggaaggttgtccaaaacaccctaagggcattatttcgcgtagagatgtggaaaaatttctttcaaaaaaaaggaaatttccaaagaactacatgtcacagtattttaagctcctagaaaaattccagattgctttgccaataggagaagaatatttgctggttccaagcagtttgtctgaccacaggcctgtgatagagcttccccattgtgagaactctgaaattatcatccgactatatgaaatgccttattttccaatgggattttggtcaagattaatcaatcgattacttgagatttcaccttacatgctttcagggagagaacgagcacttcgcccaaacagaatgtattggcgacaaggcatttacttaaattggtctcctgaagcttattgtctggtaggatctgaagtcttagacaatcatccagagagtttcttaaaaattacagttccttcttgtagaaaaggctgtattcttttgggccaagttgtggaccacattgattctctcatggaagaatggtttcctgggttgctggagattgatatttgtggtgaaggagaaactctgttgaagaaatgggcattatatagttttaatgatggtgaagaacatcaaaaaatcttacttgatgacttgatgaagaaagcagaggaaggagatctcttagtaaatccagatcaaccaaggctcaccattccaatatctcagattgcccctgacttgattttggctgacctgcctagaaatattatgttgaataatgatgagttggaatttgaacaagctccagagtttctcctaggtgatggcagttttggatcagtttaccgagcagcctatgaaggagaagaagtggctgtgaagatttttaataaacatacatcactcaggctgttaagacaagagcttgtggtgctttgccacctccaccaccccagtttgatatctttgctggcagctgggattcgtccccggatgttggtgatggagttagcctccaagggttccttggatcgcctgcttcagcaggacaaagccagcctcactagaaccctacagcacaggattgcactccacgtagctgatggtttgagatacctccactcagccatgattatataccgagacctgaaaccccacaatgtgctgcttttcacactgtatcccaatgctgccatcattgcaaagattgctgactacggcattgctcagtactgctgtagaatggggataaaaacatcagagggcacaccagggtttcgtgcacctgaagttgccagaggaaatgtcatttataaccaacaggctgatgtttattcatttggtttactactctatgacattttgacaactggaggtagaatagtagagggtttgaagtttccaaatgagtttgatgaattagaaatacaaggaaaattacctgatccagttaaagaatatggttgtgccccatggcctatggttgagaaattaattaaacagtgtttgaaagaaaatcctcaagaaaggcctacttctgcccaggtctttgacattttgaattcagctgaattagtctgtctgacgagacgcattttattacctaaaaacgtaattgttgaatgcatggttgctacacatcacaacagcaggaatgcaagcatttggctgggctgtgggcacaccgacagaggacagctctcatttcttgacttaaatactgaaggatacacttctgaggaagttgctgatagtagaatattgtgcttagccttggtgcatcttcctgttgaaaaggaaagctggattgtgtctgggacacagtctggtactctcctggtcatcaataccgaagatgggaaaaagagacataccctagaaaagatgactgattctgtcacttgtttgtattgcaattccttttccaagcaaagcaaacaaaaaaattttcttttggttggaaccgctgatggcaagttagcaatttttgaagataagactgttaagcttaaaggagctgctcctttgaagatactaaatataggaaatgtcagtactccattgatgtgtttgagtgaatccacaaattcaacggaaagaaatgtaatgtggggaggatgtggcacaaagattttctccttttctaatgatttcaccattcagaaactcattgagacaagaacaagccaactgttttcttatgcagctttcagtgattccaacatcataacagtggtggtagacactgctctctatattgctaagcaaaatagccctgttgtggaagtgtgggataagaaaactgaaaaactctgtggactaatagactgcgtgcactttttaagggaggtaatggtaaaagaaaacaaggaatcaaaacacaaaatgtcttattctgggagagtgaaaaccctctgccttcagaagaacactgctctttggataggaactggaggaggccatattttactcctggatctttcaactcgtcgacttatacgtgtaatttacaacttttgtaattcggtcagagtcatgatgacagcacagctaggaagccttaaaaatgtcatgctggtattgggctacaaccggaaaaatactgaaggtacacaaaagcagaaagagatacaatcttgcttgaccgtttgggacatcaatcttccacatgaagtgcaaaatttagaaaaacacattgaagtgagaaaagaattagctgaaaaaatgagacgaacatctgttgagtaagagagaaataggaattgtctttggataggaaaattattctctcctcttgtaaatatttattttaaaaatgttcacatggaaagggtactcacattttttgaaatagctcgtgtgtatgaaggaatgttattatttttaatttaaatatatgtaaaaatacttaccagtaaatgtgtattttaaagaactatttaaaacacaatgttatatttcttataaataccagttactttcgttcattaattaatgaaaataaatctgtgaagtacctaatttaagtactcatactaaaatttataaggccgataattttttgttttcttgtctgtaatggaggtaaactttattttaaattctgtgcttaagacaggactattgcttgtcgatttttctagaaatctgcacggtataatgaaaatattaagacagtttcccatgtaatgtattccttcttagattgcatcgaaatgcactatcatatatgcttgtaaatattcaaatgaatttgcactaataaagtcctttgttggtatgtgaattctctttgttgctgttgcaaacagtgcatcttacacaacttcactcaattcaaaagaaaactccattaaaagtactaatgaaaaaacatgacatactgtcaaagtcctcatatctaggaaagacacagaaactctctttgtcacagaaactctctgtgtctttcctagacataatagagttgtttttcaactctatgtttgaatgtggataccctgaattttgtataattagtgtaaatacagtgttcagtccttcaagtgatatttttatttttttattcataccactagctacttgttttctaatctgcttcattctaatgcttatattcatcttttccctaaatttgtgatgctgcagatcctacatcattcagatagaaacctttttttttttcagaattatagaattccacagctcctaccaagaccatgaggataaatatctaacacttttcagttgctgaaggagaaaggagctttagttatgatggataaaaatatctgccaccctaggcttccaaattatacttaaattgtttacatagcttaccacaataggagtatcagggccaaatacctatgtaataatttgaggtcatttctgctttaggaaaagtactttcggtaaattctttggccctgaccagtattcattatttcagataattccctgtgataggacaactagtacatttaatattctcagaacttatggcattttactatgtgaaaactttaaatttatttatattaagggtaatcaaattcttaaagatgaaagattttctgtattttaaaggaagctatgctttaacttgttatgtaattaacaaaaaaatcatatataatagagctctttgttccagtgttatctctttcattgttactttgtatttgcaattttttttaccaaagacaaattaaaaaaatgaataccatatttaaatggaataataaaggttttttaaaaactttaaa

SEQ ID NO: 2 - DNA, 9239 bp, Homo sapiens
tttaaagtttttaaaaaacctttattattccatttaaatatggtattcatttttttaatttgtctttggtaaaaaaaattgcaaatacaaagtaacaatgaaagagataacactggaacaaagagctctattatatatgatttttttgttaattacataacaagttaaagcatagcttcctttaaaatacagaaaatctttcatctttaagaatttgattacccttaatataaataaatttaaagttttcacatagtaaaatgccataagttctgagaatattaaatgtactagttgtcctatcacagggaattatctgaaataatgaatactggtcagggccaaagaatttaccgaaagtacttttcctaaagcagaaatgacctcaaattattacataggtatttggccctgatactcctattgtggtaagctatgtaaacaatttaagtataatttggaagcctagggtggcagatatttttatccatcataactaaagctcctttctccttcagcaactgaaaagtgttagatatttatcctcatggtcttggtaggagctgtggaattctataattctgaaaaaaaaaaaggtttctatctgaatgatgtaggatctgcagcatcacaaatttagggaaaagatgaatataagcattagaatgaagcagattagaaaacaagtagctagtggtatgaataaaaaaataaaaatatcacttgaaggactgaacactgtatttacactaattatacaaaattcagggtatccacattcaaacatagagttgaaaaacaactctattatgtctaggaaagacacagagagtttctgtgacaaagagagtttctgtgtctttcctagatatgaggactttgacagtatgtcatgttttttcattagtacttttaatggagttttcttttgaattgagtgaagttgtgtaagatgcactgtttgcaacagcaacaaagagaattcacataccaacaaaggactttattagtgcaaattcatttgaatatttacaagcatatatgatagtgcatttcgatgcaatctaagaaggaatacattacatgggaaactgtcttaatattttcattataccgtgcagatttctagaaaaatcgacaagcaatagtcctgtcttaagcacagaatttaaaataaagtttacctccattacagacaagaaaacaaaaaattatcggccttataaattttagtatgagtacttaaattaggtacttcacagatttattttcattaattaatgaacgaaagtaactggtatttataagaaatataacattgtgttttaaatagttctttaaaatacacatttactggtaagtatttttacatatatttaaattaaaaataataacattccttcatacacacgagctatttcaaaaaatgtgagtaccctttccatgtgaacatttttaaaataaatatttacaagaggagagaataattttcctatccaaagacaattcctatttctctcttactcaacagatgttcgtctcattttttcagctaattcttttctcacttcaatgtgtttttctaaattttgcacttcatgtggaagattgatgtcccaaacggtcaagcaagattgtatctctttctgcttttgtgtaccttcagtatttttccggttgtagcccaataccagcatgacatttttaaggcttcctagctgtgctgtcatcatgactctgaccgaattacaaaagttgtaaattacacgtataagtcgacgagttgaaagatccaggagtaaaatatggcctcctccagttcctatccaaagagcagtgttcttctgaaggcagagggttttcactctcccagaataagacattttgtgttttgattccttgttttcttttaccattacctcccttaaaaagtgcacgcagtctattagtccacagagtttttcagttttcttatcccacacttccacaacagggctattttgcttagcaatatagagagcagtgtctaccaccactgttatgatgttggaatcactgaaagctgcataagaaaacagttggcttgttcttgtctcaatgagtttctgaatggtgaaatcattagaaaaggagaaaatctttgtgccacatcctccccacattacatttctttccgttgaatttgtggattcactcaaacacatcaatggagtactgacatttcctatatttagtatcttcaaaggagcagctcctttaagcttaacagtcttatcttcaaaaattgctaacttgccatcagcggttccaaccaaaagaaaatttttttgtttgctttgcttggaaaaggaattgcaatacaaacaagtgacagaatcagtcatcttttctagggtatgtctctttttcccatcttcggtattgatgaccaggagagtaccagactgtgtcccagacacaatccagctttccttttcaacaggaagatgcaccaaggctaagcacaatattctactatcagcaacttcctcagaagtgtatccttcagtatttaagtcaagaaatgagagctgtcctctgtcggtgtgcccacagcccagccaaatgcttgcattcctgctgttgtgatgtgtagcaaccatgcattcaacaattacgtttttaggtaataaaatgcgtctcgtcagacagactaattcagctgaattcaaaatgtcaaagacctgggcagaagtaggcctttcttgaggattttctttcaaacactgtttaattaatttctcaaccataggccatggggcacaaccatattctttaactggatcaggtaattttccttgtatttctaattcatcaaactcatttggaaacttcaaaccctctactattctacctccagttgtcaaaatgtcatagagtagtaaaccaaatgaataaacatcagcctgttggttataaatgacatttcctctggcaacttcaggtgcacgaaaccctggtgtgccctctgatgtttttatccccattctacagcagtactgagcaatgccgtagtcagcaatctttgcaatgatggcagcattgggatacagtgtgaaaagcagcacattgtggggtttcaggtctcggtatataatcatggctgagtggaggtatctcaaaccatcagctacgtggagtgcaatcctgtgctgtagggttctagtgaggctggctttgtcctgctgaagcaggcgatccaaggaacccttggaggctaactccatcaccaacatccggggacgaatcccagctgccagcaaagatatcaaactggggtggtggaggtggcaaagcaccacaagctcttgtcttaacagcctgagtgatgtatgtttattaaaaatcttcacagccacttcttctccttcataggctgctcggtaaactgatccaaaactgccatcacctaggagaaactctggagcttgttcaaattccaactcatcattattcaacataatatttctaggcaggtcagccaaaatcaagtcaggggcaatctgagatattggaatggtgagccttggttgatctggatttactaagagatctccttcctctgctttcttcatcaagtcatcaagtaagattttttgatgttcttcaccatcattaaaactatataatgcccatttcttcaacagagtttctccttcaccacaaatatcaatctccagcaacccaggaaaccattcttccatgagagaatcaatgtggtccacaacttggcccaaaagaatacagccttttctacaagaaggaactgtaatttttaagaaactctctggatgattgtctaagacttcagatcctaccagacaataagcttcaggagaccaatttaagtaaatgccttgtcgccaatacattctgtttgggcgaagtgctcgttctctccctgaaagcatgtaaggtgaaatctcaagtaatcgattgattaatcttgaccaaaatcccattggaaaataaggcatttcatatagtcggatgataatttcagagttctcacaatggggaagctctatcacaggcctgtggtcagacaaactgcttggaaccagcaaatattcttctcctattggcaaagcaatctggaatttttctaggagcttaaaatactgtgacatgtagttctttggaaatttccttttttttgaaagaaatttttccacatctctacgcgaaataatgcccttagggtgttttggacaaccttccactttcactgtcaaaatctgtgccatgattttacaaagccacttgggttccacaaagtacaagtcacttaactgcagtgctgggtcttgaaaatgaagaaggactcctgattcatttagaaagtgaactgcgtgaggaagctcattttcatctaactgcagctgattttctctcactagttgtaataatcgtttccggtcaattacgggaaattcaattggcacatttttacgctccgataaaatgattttttcaagttctacatagcagtctggaatcagctgtccaacaacaagctgatctcggatcttgaaattaaggctctcgtttatgatggttttccgaagttttgccaaagcatcagattcctcggtggcattcacaaagtggtaatctcgtatggcagggaaccctcgcttattcaggagttccttggtgattttactcatgcaggctttgcgttgcttctcatcagaaacatccaaatgtgtgccaacgagaatcacaggggaagaagaagcgcgagcctttatattgaagagccaaggcttcatggcatcaacttcagcctgtcccttgctgaggtcatagacagcaaggtacaatgctcgctgcgtcataaaatggggatgagtactatagaattcctcacgacctgcaaaatcccacacatttaggacgagatctctctttcttttgtctcttatttggataggccagtctttcacatctatgccaactgtggcactttgcattccaagatctgatttcttggttttcattaattgctgcaataaggtggttttaccactcccagtatttcccacaatcataagtttcattcggttataaggcacagccttttttaatcgctgttgaagaaaccttatgatgtctttggctttacatcctatatgtttaaaatcaaagttaagatgcagttcatccaaaggaagatcccatattttgcttaatttccccatttcattgggaaaggatcttagttccaagttgtaactgacatccagagatgtcagattttcaagacagccaatctcaggaggaatctctttcagtttattgtgagaaagatgcagtttctctactctagaccataaatatgctttttcactcaagtccaagatgctgatctgattatggctaaataagagttcccttaagttcaaagatttccagtgtgcgggacctggtaggtactgaatatcattgctgctcatatctaaagaccgcaagtgtggaagatttaaaattgcttctggaatacaggaaaatttgttctgagataattttaggattgtcatagaaggaggcaagaaaggcatagcagcaagaaaattcattctggcactgaaactctccactttaggacaagcctcaagaaagttctctgatagggatgaaatgtggttcttactaaggtttaaaatcttcagttccttcagtctcaagggggagcatatccctgatattttatttccttctaaaatgagctgctccagtttctctaccacatcagtgaggttctcaggtacaaaagacagctggttatatgacaggttaaactgtttcagagttggacatttcactgtaggatctaaaaccactgagggtccaatgtcatttcgagagacatcaagattagcaatacaactcattttcaacaaataagaaggaaatgatgtaaatttattactgtgcaagtccaaatgtgtcaaactcttcagagtttcacatagctgttgtggaaagctcgtgagtgcattctggtgaagctccagcttttcaagatgctccaaatgaacacttatacagcatttctggcttagggcatcaatatctcttagttcatttgctgaaaggtctagtgatgtaatatattctctctcagaagccagagaagaaatgctgtctgaatgcctcatatgggattgaagttttgatgacctgagtgaatcatctgaagataatatttttctttttcgcttcagtaaatcttcatgatcaaaaatgggccccaaggaattggaatgtctttgcaaatttggtgagcaacgctgtaatacggcatctcggtaaaattctcctacactaattgaattagatttctttttcacaagaaatgagccttcacttccttcactatccaggtcatcactttgagcaaacacactgtccatagaagagtcaggaataaaggtccattcatcaaatttagacagcacatcttcagaaaaatttccatcgctgcctgaggctgttccttcttccacagcacttttcatctgatatctgatcaccattcttgctagtgtagatgctatatttgtttgtttccttaaattagaagtcttatctggaaataaaggaccaagccaagaaggttcaacttttcctatacaaaatcctccaaggcaaatgctattgttggccacatccagggccagcctccttaagagcaagctgatgatctggctgtcacctttcccaatgcttatcgtcaacgcttttcgtacatcttgttcacgagatccactattcagtaagagttccaccaatttgggactgctctctttctcacatacctgacaaattaaagaagatccctcctttgcttgattggcatctgctcccaatagaagcaagcattcaaccatgatgctgttattctgatcacacgctctctctagcatcacattttttaagtaatcatccatagctacttttgcaaaacacttgcaacagaggtttagaaactgttgatccttttgttccatgatattggaagacatttgatggaatattactaagtcaaatgaatgatgcaccagcagcttagaaaaagatgctgacaatttgaggattgctaagattgtctgaaatcctttagtctgtatttcagcaacatccttaaatcggtataagctggaaaccagaatttttgccagcagatgtccagttcctatgaacacattcttctttgtaatcaagtatcctataagacttaaacccagacactgaatttcttggtcatctggatacatctgcagtgtgtgaagcactgaatccatagcaccttccagggataacatctctaatgcatcaggaaaatgtacaatagaagaaattacttttaatccacatttctgaatcccaggatttccaatgaacctgttcaaagctgctaggaccagtttgtgaatatcattcttgaaacactgttttttaaccatatttagcttatgatgaaattctgtatcctccctggattcttctggcatgccaggcactataaaatgtaaaatagctcgaagcgcctccagctgcactggtaatgatgtctcatgacgtttcataactgttagtattttggggaccactgctgccattatatccagggaagtgttgcttccttcaaaaagatgatttagcattttacagccactttcagccacttcaggagaatgtatatgcttctgcattaactccaaaacattcaggtgtattccttttgataacagtatttttctgaaattaacattttgttctaagagagttgacaatgcattcgcagatgcctggaaaacttcctttgatgaagaatgcatcagcatggagagcatcacttccctatgagctgggaaatggccatcttcatctccaatcttctcatgtaaactgttttggtacataaggagattatttagtgcccagcatgcggcctcctgcacgtgcttgttctttctatgccacgttaatgctttgtaacaggcttccagccaaaacaatttatcttcttccccctcatcatcattctcttgattctcattcttttcctctaaatcttgatttaagaaaatagtctcagtgaggagggccaaacagctgagcgctgagatctgcaatgctgcattctctgggtactgctgcacagctttcaccacaaactcatggacttcgtttaataccaggatattgaaaaaattacctaatgtaagcctatggagcaaacagcaactcacttcttgaattctttcactcatagggaatgctttcatagcttccaccacaatattataacacctgacattgccactcatgaggacttccacattattgcaaggaatcgctagggaatgtaaacaatgcagcacatgaagcacaatttcctcttcatctttaaaatttgttaacgcacttaacaatatcatataatctttgttctcaacaaattcagtcagttgctcctctgagactctctcaaacagcacatgtaaagctttgcatccaagtttctggacttcatcattggctggaaatgagtgcatggcatcaaaaattaacatgaaaatatcactttcttcatccaatatcagcaaggtgattttacctgaagttaggaggagatctaaggtcttcagtccaatcactgacaagtttacactggcattatgaactgttagcattttaagaatcaattggtgaacaccaaggacttcccaatcatttccaacatcctggggtcccattaagctttgcattgtacctggacagacttctattaatttgcacagaagtgaccaacccacctgctgcacactcgcgactctcatataggagtccaagacgatcaacagaggcacatggatatttttgccttgaaataacttggaggcgcgctcggagtacgtgaacaccagcagatcctccaggatttggaccagcgtttctatctgttttccttcctggacattgttcagcctgactatcaacttcttcagagtttcctcgtcctcttcgcacccctgacagctgccactagccatggtggcacctgcttccaacccgccgccctcccagcatgaacgtccgctgctcagggaaccggcaggggcgccggccacagctccccgggggcgagctcagctcaccgcccgcagccagcgctccccgcgggcccc

SEQ ID NO: 3 - DNA, 8617 bp, Macaca mulatta
acgggcacggtcatcccggccaggcccggctccagcagccccacggccgccgccgaagttctgcgcggcccgtcgccccggcggagcctctggcaggcccctgagctggttttttggggcctggctgggggaggaggaagccgagcaggagggctctggagagggagggcaacgcggggcggggagccaccgccttcctcataaacaggcgggcgtgggcgccgacggggcccccggggagccctggctgagggcggtgagctgagctagatcccggggagctgtggccggcgcccctgccggttccctgagcagcggacgttcgtgctgggagggcggcgggttggaagcaggggccaccatggctagtggcagctgtcaggggtgcgaggaggacgaggaaactctgaagaagttgatagtcaggctgaacaatgtccaggaaggtaaacagatagaaacgctggtccaaatcctggaggatctgctggtgttcacgtactccgagcacgcctccaagttatttcaaggcaaaaatatccatgtgcctctgttgatcgtcttggactcgtatatgagagtcgcgagtgtgcagcaggtgggttggtcacttctgtgcaaattaatagaaatctgcccgggtacaatgcaaagcttaatgggaccccaggatgttggaaatgattgggaagtccttggtgttcaccaattgattcttaaaatgctaacagttcataatgccagtgtaaacttgtcaatgattggactgaagaccttagatctcctcctaacttcaggtaaaatcaccttactgatattggatgaagaaagtgatattttcatgttaatttttgatgccatgcactcatttccagccaatgatgaaatccagaaacttggatgcaaagctttacatgtgctgtttgaaagagtctcagaggagcaactaactgaatttgttgagaacaaagattatatgatattgttaagtgcgttaacaaattttaaagatgaagaggaaattgtgcttcatgtactgcattgtttacattccctagcaattccttgcaataatgtggaagtcctcatgagtggcaatgtcaggtgttataatattgtggtggaagctatgaaagcattccctatcagtgaaaaaattcaagaagtgagttgctgtttgctccataggcttacattaggtaatttttttaatatcctggtattaaacgaagtccatgaatttgtggtgaaagctgtgcagcggtacccagagaacgcagcattacagatctcagcgctcagctgtttggccctcctcactgagaccattttcttaaatcaagatttagaggaaaagaatgagaatcaagagaatgatgatgagggggaagaagttaaattgttttggctggaagcctgttacaaagcgttaacgtggcatagaaagaacaagcacgtgcaggaggctgcatgctgggcactaaataatctccttatgtaccaaaacagtttacatgagaagattggagatgaagatggccatttcccagctcatagggaagtgatgctgtccatgctgatgcattcatcatcaaaggaagttttccaggcatctgctaatgcattgtcaactcttttagaacaaaatgttaatttcagaaaaatcctgttatcaaaaggaatatacctgaatgttttggagttaatgcagaagcatatacattctcctgaagtggctgaaagtggctgtaaaatgctaaatcatctttttgaaggaagcaacacatccctggatacaatggcagcagtgctccccaaaataataacagttatgaaaagtcatgagacatcattaccagtgcagctggaggcgcttcgagctattttacattttatagtgccaggcatgccagaagaatccagagaggatgcagaatctcatcgtaagctaaatatggttaaaaaacagtgtttcaagaatgatattcacaaactggtcctagcagctttgaacaggttcattggaaatcctgggattcagaaatgtggattaaaagtaatttcttttattgcacattttactgatgcattaggggtgttatccctggaaggtgctgtggattcagtgcttcacacactgcagatgtatccagatgaccaagaaattcagtgtctgggtttaagtcttataggatgcttgattacaaagaagaatttatgcataggaactggacatctgctggcaaaaattctggcttccagcttataccgatttaaggatgttgctgaagtacagactgaaggatttcagacaatcttagcaatcctcaaattgtcagcatctttttctaagctgctggtgcatcattcgtttgacttagtaatattccatcaaatgtcttccagtatcatggaacaaaaggatcaacagtttctaaacctctgttgcaagtgttttgcaaaagtagctatggatgatgacttaaaaaatatgatgctagagagagcgtgtgatcagaataacagcatcatggttgaatgcttgcttctattaggagcagatgccaatcaagcaaaggagggaacttctttaatttgtcaggtatgtgagaaagagagcagtcccaaattggtggaactcttattgaatagtggatctcgtgaacaagatgtacgaaaagcgctgacaataagcattgggaaaggcgacagccagatcatcagcttgctcttaaggaggctggccctggacatggccaacaatagcatttgccttggagggttttgtataggaaaagttgaaccttcttggcttggtcctttatttccagataagacttctaatttaaggaaacaaacaaatatagcatctacactagcaagaatggtgatcagatatcagatgaaaagtgccatggaagaaggagcagcctcaggcagtgatggaaatttttctgaagatgtgctgtctaaatttgatgaatggacctttattcctgactcttctatggacagtgtctttgctcaaagtgatgatctagatagtgaaggaagtgaaggctcatttcttgtgaaaaagaaatcaaattcaattagtgtaggagaattttaccgagatgccgtattacaacgttgctcaccaaatttgcaaaggcattccagttccttggggcccatttttgatcatgaagatttactgagaagaaaaagaaaaatattatcttcagatgattcactcaggtcatcaaaacttcaatcccatatgaggcattcagacagcatttcttctctggcttctgagagagaatatattacatcactagacctttcagcaaatgaactaagagatattgatgccctaagccagaaatcctgtataagtggtcatttggagcatcttgaaaagctggagcttcaccagaatgcactcacgagctttccacaacagctatgtgaaactctgaagagtttgacacatttggacttgcacagtaataaatttacatcatttccttcttacttgttgaaaatgagttgtgttgctaaccttgatgtctctcgaaatgacattggaccctcagtggttttagatcctgcagtgaaatgtccaactctgaaacagtttaacctgtcatataaccagctgtcttctgttcctgagaaccttgctgatgggatagagaaactggagcagctcattttagaaggaaataaaatatcagggatatgctcccccttgagactgaaggaactgaagattttaaaccttagtaaaaaccacatttcatccctatcagagaactttcttgaggcttgtcctaaagtggagagtttcagtgccagaatgaattttcttgctgctatgcctttcttgcctccttccatgacaagcctaaaattatctcaaaacaaatttacatgtattccagaagcaattttaaatcttccacacttgcggtctttagatatgagcagcaatgatattcaatatctaccaggtcctgcacactggaaatctttgaacttaagggaactcttatttagccataatcagatcagcatcttggacttgagtgaaaaagcgtatttatggtctagagtagagaaactgcatctttctcacaataaactgaaagagattcctcctgagattggctgtcttgaaaatctgacatctctggatgtcagttacaacttggaactaagatcctttcccaatgaaatggggaaattaagcaaaatatgggatcttcctttggatgaactgcgtcttaactttgattttaaacatataggatgtaaagccaaagacatcataaggtttcttcagcagcggttaaaaaaggctgtgccctataaccgaatgaaacttatggttgttggaaatactgggagtggtaaaaccaccttgttgcagcaattaatgaaaaccaagaaatcagatcttggaatgcaaagtgccacagttggcatagatgtgaaagactggcctatccaaataagaggcaaaagaaagagagatctcgttctgaatgtgtgggattttgcaggtcgtgaggaattctatagcactcatcctcattttatgacgcagcgagcattgtaccttgctgtctatgaccttagcaaaggacaggctgaagttgatgccatgaagccttggctcttcaatataaaggctcgcgcttcttcttcccctgtgattctcgttggcacacatttggatgtttctgatgagaggcagcgcaaagcctgcataggtaaaatcaccaaggaactcctgaataagcgagggttccctgctatacgagattaccactttgtgaatgccaccgaggaatctgatgctttggcaaaacttcggaaaaccatcataaacgagagccttaatttcaagatccgagatcagcctgttgttggacagctgattccagactgctatgtagaacttgagaaaatcattttatcggagcgtaaaaatgtgccaattgaatttcctgtaattgaccagaaacgattattacaactagtgagagaaaatcagttgcagttagatgaaaatgagcttcctcacgcagttcactttctaaatgaatcaggagtccttcttcattttcaagacccagcactgcagttaagtgacttgtattttgtggaacccaagtggctttgtaaaatcatggcacagattttgacagtgaaagtggaaggttgtccaaaacaccctaagggaattatttcacgtagagatgtggaaaaatttctttcgaagaaaaggagatttccaaagaactacatgtcacagtattttaagctcctagaaaaattccagattgctttgccaataggagaagaatatttgctggttccaagcagtttgtctgaccacaggcctgtgatagagcttccccattgtgagaactctgaaattatcatccgactatatgaaatgccttattttccaatgggattttggtcgaggttaatcaatcgattacttgagatttcaccttacatgctttcagggagagaacgagcacttcgcccaaacagaatgtattggcgacaaggcatctacttaaattggtctcctgaagcttattgtctggtaggatctgaagtcttagacaatcacccagagagtttcttaaaaattacagttccttcttgtagaaaaggctgtattcttttgggccaagttgtggaccacattgattctctcatggaggaatggtttcctgggttgctggagattgatatttgtggtgaaggagaaactctgttgaagaaatgggcattatatagttttaatgatggtgaagagcatcaaaaaatcttacttgatgacttgatgaagaaagcagaggaaggagatctcttagtaaatccagatcaaccaaggctcaccattccaatatctcagattgcccctgacttgattttggctgacctgcctagaaatattatgttgaataatgatgagctggaatttgaacaagctccagagtttctcctaggtgatggcagttttggatcagtttatcgagcagcctatgaaggagaagaagtggctgtgaagatttttaataaacacacatcacttaggctgttaagacaagagctggtggtgctttgccacctccaccaccccagtttgatatctttgctggcagctggtattcgtccccggatgttggtgatggagttagcctccaagggttccttggatcgcctgcttcagcaggacaaagccagcctcactagaaccctacagcacaggattgcactccatgtggctgatggtttgagatacctccattcagccatgattatataccgagacttgaagccccacaatgtgctgcttttcacactgtatcccaatgctgccatcattgcaaagattgctgactacggcattgctcagtactgctgtagaatggggataaaaacgtcagagggcacaccagggtttcgtgcacctgaagttgccagaggaaatgtcatttataatcaacaagctgatgtttattcatttggtttgctactctatgacattttgacaactggaggtagaatagtagagggtttgaagtttccaaatgagtttgatgaattagcaatacaaggaaaattacctgatccagttaaagaatatggttgtgccccatggcctatggttgagaaattaattacaaagtgtttgaaagaaaatcctcaagaaaggcctacttctgcccaggtctttgacattttgaattcagctgaattagtctgtctgacgagacacattttattacctaaaaacgtaattgttgactgcatggttgctacacatcacaacagcaggaatgcaagcatttggctgggctgtgggcacaccaacagaggacagctctcatttcttgacttaaatactgaaggatacacttctgaggaggttgctgatagtagaatattgtgcttagccttggtgcatcttcctgttcaaaaagaaagctggattgtgtccgggacacagtctggtactctcctggtcatcaataccgaagatgggaaaaagagacataccctagaaaagatgactgattccatcacttgtttgtattgcaattccttttccaagcaaagcaaacaaaaaaattttcttttggttggaaccgctgatggcaatttagcaatttttgaagataaaactgttaagcttgaaggagctgctcctttgaagatactaaatataggaaatgtcagtactccattgatgtgtttgagtgaatccacaaattcaacagaaagaaatgtaatgtggggaggatgtggcacaaagattttctccttttctaatgatttcaccattcagaaactcattgagacaagaacaagccaactgttctcaagtgattctaaagtatattcgaggttaagatatactgcagactgcaatgtattgttttcttacgcagctttcagtgattccaacatcgtaacagtggtggtagacactgttctctatattgctaagaaaaatagccctgttgtggaagtgtgggataagaaaactgaaaaactctgcgaactaatagactgtgtgcattttttaagggaggtaatggtaaaagtaaacaaggaatcaaaacacaaaatgtcttattctgggagagtgaaagctctctgccttcagaagaacactgctctttggataggaactggaggaggccatattttactcctggatctttcaactcgtcgagttatacgtataatttacaacttttgtgattcggtcagagtcatgatgacagcacagctagggagccttaaaaatgtcatgctggtattgggctataaccggaaaagtactgaaggtacacaacagcagaaagagatacaatcttgcttgactgtttgggacatcaatcttccacatgaagtgcaaaatttagaaaaacacattgaagtgagaaaagaattagctgaaaaaatgagaggaacatctattgaataagagagaaacaggaattgtctttggataggaaaattattctcttgtaaatatttatttaaaaatgttcacatgaaaagggtactcacattttttgaaatagctcatgtgtatatgaaggaatgttatatttttaatttaaatatatgtaaaaatacttaccagtaaacatatattttaaagaactatttaaaacacaatgttgtatttcttatgaataccagttacttttgtgcattaattaatgaaaataaatctgtgaaatacctaatttaagtactcatactaaaatttataaggccgataattttttgttttcttgtctgtaatgaagataaactttattttaaattctatgcttaagacaagactattgcttgttgatttttctagaaatccgcaaggtagaatgaaaatattaagacagtttcccgtgtaatgtattccctcttagattgctttgaaatgcactatcatatatgcttgcaaatattcaaatgaatttgcactaataaattcctttgttggtatgtgaattctctttgttgctgttgcagacagtgcatcttacacaacttcactcaatccaaaagaaaactccattaaaagtactaa

SEQ ID NO: 4 - DNA, 8617 bp, Macaca mulatta
ttagtacttttaatggagttttcttttggattgagtgaagttgtgtaagatgcactgtctgcaacagcaacaaagagaattcacataccaacaaaggaatttattagtgcaaattcatttgaatatttgcaagcatatatgatagtgcatttcaaagcaatctaagagggaatacattacacgggaaactgtcttaatattttcattctaccttgcggatttctagaaaaatcaacaagcaatagtcttgtcttaagcatagaatttaaaataaagtttatcttcattacagacaagaaaacaaaaaattatcggccttataaattttagtatgagtacttaaattaggtatttcacagatttattttcattaattaatgcacaaaagtaactggtattcataagaaatacaacattgtgttttaaatagttctttaaaatatatgtttactggtaagtatttttacatatatttaaattaaaaatataacattccttcatatacacatgagctatttcaaaaaatgtgagtacccttttcatgtgaacatttttaaataaatatttacaagagaataattttcctatccaaagacaattcctgtttctctcttattcaatagatgttcctctcattttttcagctaattcttttctcacttcaatgtgtttttctaaattttgcacttcatgtggaagattgatgtcccaaacagtcaagcaagattgtatctctttctgctgttgtgtaccttcagtacttttccggttatagcccaataccagcatgacatttttaaggctccctagctgtgctgtcatcatgactctgaccgaatcacaaaagttgtaaattatacgtataactcgacgagttgaaagatccaggagtaaaatatggcctcctccagttcctatccaaagagcagtgttcttctgaaggcagagagctttcactctcccagaataagacattttgtgttttgattccttgtttacttttaccattacctcccttaaaaaatgcacacagtctattagttcgcagagtttttcagttttcttatcccacacttccacaacagggctatttttcttagcaatatagagaacagtgtctaccaccactgttacgatgttggaatcactgaaagctgcgtaagaaaacaatacattgcagtctgcagtatatcttaacctcgaatatactttagaatcacttgagaacagttggcttgttcttgtctcaatgagtttctgaatggtgaaatcattagaaaaggagaaaatctttgtgccacatcctccccacattacatttctttctgttgaatttgtggattcactcaaacacatcaatggagtactgacatttcctatatttagtatcttcaaaggagcagctccttcaagcttaacagttttatcttcaaaaattgctaaattgccatcagcggttccaaccaaaagaaaatttttttgtttgctttgcttggaaaaggaattgcaatacaaacaagtgatggaatcagtcatcttttctagggtatgtctctttttcccatcttcggtattgatgaccaggagagtaccagactgtgtcccggacacaatccagctttctttttgaacaggaagatgcaccaaggctaagcacaatattctactatcagcaacctcctcagaagtgtatccttcagtatttaagtcaagaaatgagagctgtcctctgttggtgtgcccacagcccagccaaatgcttgcattcctgctgttgtgatgtgtagcaaccatgcagtcaacaattacgtttttaggtaataaaatgtgtctcgtcagacagactaattcagctgaattcaaaatgtcaaagacctgggcagaagtaggcctttcttgaggattttctttcaaacactttgtaattaatttctcaaccataggccatggggcacaaccatattctttaactggatcaggtaattttccttgtattgctaattcatcaaactcatttggaaacttcaaaccctctactattctacctccagttgtcaaaatgtcatagagtagcaaaccaaatgaataaacatcagcttgttgattataaatgacatttcctctggcaacttcaggtgcacgaaaccctggtgtgccctctgacgtttttatccccattctacagcagtactgagcaatgccgtagtcagcaatctttgcaatgatggcagcattgggatacagtgtgaaaagcagcacattgtggggcttcaagtctcggtatataatcatggctgaatggaggtatctcaaaccatcagccacatggagtgcaatcctgtgctgtagggttctagtgaggctggctttgtcctgctgaagcaggcgatccaaggaacccttggaggctaactccatcaccaacatccggggacgaataccagctgccagcaaagatatcaaactggggtggtggaggtggcaaagcaccaccagctcttgtcttaacagcctaagtgatgtgtgtttattaaaaatcttcacagccacttcttctccttcataggctgctcgataaactgatccaaaactgccatcacctaggagaaactctggagcttgttcaaattccagctcatcattattcaacataatatttctaggcaggtcagccaaaatcaagtcaggggcaatctgagatattggaatggtgagccttggttgatctggatttactaagagatctccttcctctgctttcttcatcaagtcatcaagtaagattttttgatgctcttcaccatcattaaaactatataatgcccatttcttcaacagagtttctccttcaccacaaatatcaatctccagcaacccaggaaaccattcctccatgagagaatcaatgtggtccacaacttggcccaaaagaatacagccttttctacaagaaggaactgtaatttttaagaaactctctgggtgattgtctaagacttcagatcctaccagacaataagcttcaggagaccaatttaagtagatgccttgtcgccaatacattctgtttgggcgaagtgctcgttctctccctgaaagcatgtaaggtgaaatctcaagtaatcgattgattaacctcgaccaaaatcccattggaaaataaggcatttcatatagtcggatgataatttcagagttctcacaatggggaagctctatcacaggcctgtggtcagacaaactgcttggaaccagcaaatattcttctcctattggcaaagcaatctggaatttttctaggagcttaaaatactgtgacatgtagttctttggaaatctccttttcttcgaaagaaatttttccacatctctacgtgaaataattcccttagggtgttttggacaaccttccactttcactgtcaaaatctgtgccatgattttacaaagccacttgggttccacaaaatacaagtcacttaactgcagtgctgggtcttgaaaatgaagaaggactcctgattcatttagaaagtgaactgcgtgaggaagctcattttcatctaactgcaactgattttctctcactagttgtaataatcgtttctggtcaattacaggaaattcaattggcacatttttacgctccgataaaatgattttctcaagttctacatagcagtctggaatcagctgtccaacaacaggctgatctcggatcttgaaattaaggctctcgtttatgatggttttccgaagttttgccaaagcatcagattcctcggtggcattcacaaagtggtaatctcgtatagcagggaaccctcgcttattcaggagttccttggtgattttacctatgcaggctttgcgctgcctctcatcagaaacatccaaatgtgtgccaacgagaatcacaggggaagaagaagcgcgagcctttatattgaagagccaaggcttcatggcatcaacttcagcctgtcctttgctaaggtcatagacagcaaggtacaatgctcgctgcgtcataaaatgaggatgagtgctatagaattcctcacgacctgcaaaatcccacacattcagaacgagatctctctttcttttgcctcttatttggataggccagtctttcacatctatgccaactgtggcactttgcattccaagatctgatttcttggttttcattaattgctgcaacaaggtggttttaccactcccagtatttccaacaaccataagtttcattcggttatagggcacagccttttttaaccgctgctgaagaaaccttatgatgtctttggctttacatcctatatgtttaaaatcaaagttaagacgcagttcatccaaaggaagatcccatattttgcttaatttccccatttcattgggaaaggatcttagttccaagttgtaactgacatccagagatgtcagattttcaagacagccaatctcaggaggaatctctttcagtttattgtgagaaagatgcagtttctctactctagaccataaatacgctttttcactcaagtccaagatgctgatctgattatggctaaataagagttcccttaagttcaaagatttccagtgtgcaggacctggtagatattgaatatcattgctgctcatatctaaagaccgcaagtgtggaagatttaaaattgcttctggaatacatgtaaatttgttttgagataattttaggcttgtcatggaaggaggcaagaaaggcatagcagcaagaaaattcattctggcactgaaactctccactttaggacaagcctcaagaaagttctctgatagggatgaaatgtggtttttactaaggtttaaaatcttcagttccttcagtctcaagggggagcatatccctgatattttatttccttctaaaatgagctgctccagtttctctatcccatcagcaaggttctcaggaacagaagacagctggttatatgacaggttaaactgtttcagagttggacatttcactgcaggatctaaaaccactgagggtccaatgtcatttcgagagacatcaaggttagcaacacaactcattttcaacaagtaagaaggaaatgatgtaaatttattactgtgcaagtccaaatgtgtcaaactcttcagagtttcacatagctgttgtggaaagctcgtgagtgcattctggtgaagctccagcttttcaagatgctccaaatgaccacttatacaggatttctggcttagggcatcaatatctcttagttcatttgctgaaaggtctagtgatgtaatatattctctctcagaagccagagaagaaatgctgtctgaatgcctcatatgggattgaagttttgatgacctgagtgaatcatctgaagataatatttttctttttcttctcagtaaatcttcatgatcaaaaatgggccccaaggaactggaatgcctttgcaaatttggtgagcaacgttgtaatacggcatctcggtaaaattctcctacactaattgaatttgatttctttttcacaagaaatgagccttcacttccttcactatctagatcatcactttgagcaaagacactgtccatagaagagtcaggaataaaggtccattcatcaaatttagacagcacatcttcagaaaaatttccatcactgcctgaggctgctccttcttccatggcacttttcatctgatatctgatcaccattcttgctagtgtagatgctatatttgtttgtttccttaaattagaagtcttatctggaaataaaggaccaagccaagaaggttcaacttttcctatacaaaaccctccaaggcaaatgctattgttggccatgtccagggccagcctccttaagagcaagctgatgatctggctgtcgcctttcccaatgcttattgtcagcgcttttcgtacatcttgttcacgagatccactattcaataagagttccaccaatttgggactgctctctttctcacatacctgacaaattaaagaagttccctcctttgcttgattggcatctgctcctaatagaagcaagcattcaaccatgatgctgttattctgatcacacgctctctctagcatcatattttttaagtcatcatccatagctacttttgcaaaacacttgcaacagaggtttagaaactgttgatccttttgttccatgatactggaagacatttgatggaatattactaagtcaaacgaatgatgcaccagcagcttagaaaaagatgctgacaatttgaggattgctaagattgtctgaaatccttcagtctgtacttcagcaacatccttaaatcggtataagctggaagccagaatttttgccagcagatgtccagttcctatgcataaattcttctttgtaatcaagcatcctataagacttaaacccagacactgaatttcttggtcatctggatacatctgcagtgtgtgaagcactgaatccacagcaccttccagggataacacccctaatgcatcagtaaaatgtgcaataaaagaaattacttttaatccacatttctgaatcccaggatttccaatgaacctgttcaaagctgctaggaccagtttgtgaatatcattcttgaaacactgttttttaaccatatttagcttacgatgagattctgcatcctctctggattcttctggcatgcctggcactataaaatgtaaaatagctcgaagcgcctccagctgcactggtaatgatgtctcatgacttttcataactgttattattttggggagcactgctgccattgtatccagggatgtgttgcttccttcaaaaagatgatttagcattttacagccactttcagccacttcaggagaatgtatatgcttctgcattaactccaaaacattcaggtatattccttttgataacaggatttttctgaaattaacattttgttctaaaagagttgacaatgcattagcagatgcctggaaaacttcctttgatgatgaatgcatcagcatggacagcatcacttccctatgagctgggaaatggccatcttcatctccaatcttctcatgtaaactgttttggtacataaggagattatttagtgcccagcatgcagcctcctgcacgtgcttgttctttctatgccacgttaacgctttgtaacaggcttccagccaaaacaatttaacttcttccccctcatcatcattctcttgattctcattcttttcctctaaatcttgatttaagaaaatggtctcagtgaggagggccaaacagctgagcgctgagatctgtaatgctgcgttctctgggtaccgctgcacagctttcaccacaaattcatggacttcgtttaataccaggatattaaaaaaattacctaatgtaagcctatggagcaaacagcaactcacttcttgaattttttcactgatagggaatgctttcatagcttccaccacaatattataacacctgacattgccactcatgaggacttccacattattgcaaggaattgctagggaatgtaaacaatgcagtacatgaagcacaatttcctcttcatctttaaaatttgttaacgcacttaacaatatcatataatctttgttctcaacaaattcagttagttgctcctctgagactctttcaaacagcacatgtaaagctttgcatccaagtttctggatttcatcattggctggaaatgagtgcatggcatcaaaaattaacatgaaaatatcactttcttcatccaatatcagtaaggtgattttacctgaagttaggaggagatctaaggtcttcagtccaatcattgacaagtttacactggcattatgaactgttagcattttaagaatcaattggtgaacaccaaggacttcccaatcatttccaacatcctggggtcccattaagctttgcattgtacccgggcagatttctattaatttgcacagaagtgaccaacccacctgctgcacactcgcgactctcatatacgagtccaagacgatcaacagaggcacatggatatttttgccttgaaataacttggaggcgtgctcggagtacgtgaacaccagcagatcctccaggatttggaccagcgtttctatctgtttaccttcctggacattgttcagcctgactatcaacttcttcagagtttcctcgtcctcctcgcacccctgacagctgccactagccatggtggcccctgcttccaacccgccgccctcccagcacgaacgtccgctgctcagggaaccggcaggggcgccggccacagctccccgggatctagctcagctcaccgccctcagccagggctccccgggggccccgtcggcgcccacgcccgcctgtttatgaggaaggcggtggctccccgccccgcgttgccctccctctccagagccctcctgctcggcttcctcctcccccagccaggccccaaaaaaccagctcaggggcctgccagaggctccgccggggcgacgggccgcgcagaacttcggcggcggccgtggggctgctggagccgggcctggccgggatgaccgtgcccgt

SEQ ID NO: 5 - DNA, 8231 bp, Mus musculus
gagcagctctgagagcaggagccgtcccagctcgccgcagtccccgccggctgcaccatggccagtggcgcctgtcagggctgcgaagaggaagaggaggaggaggctctgaagaagttgatagtcaggctgaataatgtccaggaaggcaagcagatcgagacgttgcttcagctcctggaggacatgctggtgttcacctactcggaccgcgcctccaagttatttgaagataaaaatttccacgtgcctctgttgattgtcctggactcctacatgagagttgccagtgtacagcaggcggggtggtcacttctgtgcaaattaatagaagtctgtccagggacattgcaaagcttaataggaccccaggatattggaaatgattgggaagtccttggtattcaccggctgattcttaaaatgttaactgttcatcacgccaatgtaaacctgtcaatagttggactaaaagccttggatctcctcctagattcaggtaaactcaccttgctgatactggatgaagaatgtgatattttcttgttaatttttgatgccatgcacagatattcagccaatgatgaagtccaaaaactgggatgcaaagctttacacgtgctttttgagagagtttccgaggaacagctgactgagtttgtggagaacaaagattacacgatactgctgagtacgttcggcagcttcagaagggacaaggagattgtgtaccacgtactttgctgcttgcattccctggcggttacatgcagcaatgtagaggtcctcatgagtgggaatgtccggtgctacaatcttgtggtggaggccatgaaagccttccccaccaatgaaaacatccaagaggtgagctgctccttgttccagaagcttacattaggtaactttttcaacatcctggtgttgaacgaagtgcatgtctttgtggtgaaagcggtccgacagtatcctgagaacgcagccttacagatctctgcactcagctgtttagcactcctcactgagactattttcttaaaccaagacttggaggaaagaagtgagactcaagagcagagcgaagaggaagacagtgagaagcttttctggctggaaccctgctataaagccctggtgcgccatcgaaaggacaaacacgtgcaggaggctgcctgctgggcactaaataacctccttatgtaccagaacagtttgcatgagaagatcggagatgaagatggccagttccctgcgcacagggaagtgatgctgtctatgctgatgcactcttcttccaaagatgtcttccaagcagctgcacatgctctgtccactctcttggaacaaaatgttaatttcaggaaaatcctgctggcaaaaggagtatacctgaatgtcttggaattgatgcagaagcatgcccatgcgcctgaggtggcagagagtggctgcaagatgctgagtcacctgtttgaaggaagtaacccttctctggatacaatggcagcagtggtccctaaaatactaacagtgatgaaagcccacggaacgtctctgtcagtccagctggaggcgctgcgagctatcttgcatttcgttgtgccaggactattggaagaatccagggaggactctcaatgcagaccaaatgtgctcagaaaacagtgtttcaggactgacatccacaagctggttctagtcgctctgaacaggttcattgggaatcctgggattcagaaatgtggattgaaagtaatctcttctctcgcgcaccttcctgatgccacagagacattgtccctgcaaggagcagttgactcagtcctccacaccttacagatgtatccagatgaccaagaaattcagtgtctgggcttacaccttatgggatgcttgatgacaaagaagaatttctgcatagggacagggcacctcctggcaaaaattctggcttccactttgcagcgctttaaagatgttgctgaggtgcagactacaggattacagacaaccctgtcaatacttgagctgtcagtatctttctccaagctgctagtgcactattcctttgatgtggtgatatttcatcagatgtcttccagtgttgtagaacaaaaggatgagcagttcctcaatctatgttgcaaatgctttgcaaaagtggccgtggatgatgagctgaaaaacaccatgctagagagagcctgcgatcagaataacagcatcatggttgaatgtttgctcctcttgggagctgatgccaaccaagtgaagggggcaacttctttaatctatcaggtatgtgagaaagagagcagtcctaaattggtggaactgttgcttaatggtggttgtcgtgaacaagatgtacggaaggccctgaccgtaagcatccaaaagggcgacagccaggtcatcagcttgctcctcaggaaacttgccctggacctggccaacaacagcatttgccttggaggatttggcataggaaaaattgatccttcttggcttggtcctttatttccagataagtcatccaatttaaggaagcaaacaaacacaggatctgtcctagcgaggaaagtgctccggtatcagatgagaaacacccttcaagaaggcgtggcctcaggcagtgacggcaagttttctgaagacgcgctggcgaaatttggagaatggacctttattcccgactcttctatggacagtgtgtttggccagagcgatgatctggatagcgaaggcagcgagagctcatttctcgtgaagaggaagtccaactcaattagtgtaggggaagtttacagagatctagctctgcagcgctgctcaccaaatgctcagaggcattccaattcgctgggtcctgtttttgaccatgaagacttactgagacgaaaaagaaaaatactgtcttcagatgagtctctcaggtcctcaaggctgccgtcccatatgaggcaatcagatagctcttcttccctggcttctgagagagaacacatcacgtcgttagacctatctgccaacgaactcaaagatattgatgctctgagccagaagtgttgcctcagtagccacctggaacatctcaccaaactggaacttcaccagaattcactcacgagcttcccacagcagctgtgtgagactctgaagtgtttgatacacttggatttgcacagtaacaaattcacctcatttccctctttcgtgttgaaaatgccacgtatcaccaacctagatgcctctcgaaatgacatcgggccaacagtagttttagaccctgcgatgaagtgtccaagcctcaaacagttgaatctgtcctataaccagctctcttcaatcccagagaatcttgcccaagtggtggagaaacttgagcagctcctactggaaggaaataaaatatccgggatttgctctcccctgagcctgaaggaactgaagattttaaatcttagtaaaaatcacattccatccctacctggagattttcttgaggcttgttcaaaagtcgagagtttcagtgctcgcatgaattttcttgctgcaatgcctgccttaccttcttccataacgagcttaaaattgtctcagaactctttcacgtgcattccagaagcgattttcagtcttccgcacttgcggtccttggatatgagccacaacaacattgaatgtctgccgggacctgcacattggaagtctctgaacttaagggaactcatttttagcaagaatcagatcagcaccttagactttagtgagaacccacacgtgtggtcaagagtagagaaactgcatctctctcataataaactgaaagagattcctccagaaattggctgccttgaaaatctgacgtctctcgacgtcagttacaacttggaactgaggtccttcccaaatgaaatggggaagttgagcaagatatgggatcttcccttggacggactgcatctgaattttgactttaagcacgtaggatgcaaggccaaagacatcataaggtttctacaacaacgtctgaaaaaggctgtaccctacaaccgaatgaagctcatgattgtgggaaatacggggagcggtaagaccactttactgcaacaactcatgaaaatgaagaaaccagaacttggcatgcagggtgccacagtcggcatagacgtgcgagactggtccatccaaatacggggcaaaaggagaaaggacctggttctaaacgtgtgggattttgcaggtcgtgaggaattctacagcactcacccccacttcatgacccagagagccctctacctggctgtctatgatctcagcaaggggcaggcagaggtggacgccatgaagccctggctcttcaatatcaaggctcgtgcctcttcttccccggtgattctggtgggcacacatttggatgtttctgatgagaagcagcggaaagcgtgcataagcaaaatcacgaaggaactcctaaataagcgaggattccccaccatccgggactaccactttgtgaatgccaccgaggagtcagatgcgctggcaaagcttcggaaaaccatcataaatgagagccttaatttcaagatccgagatcagcctgtggttgggcagctaattccagattgctacgtagaactggagaaaatcattttatcagagcggaaagctgtgccgactgagtttcctgtgattaaccggaaacacctgttacagctcgtgaacgaacatcagctgcagctggatgagaacgagctcccacacgccgttcacttcctaaatgagtcgggagttcttctgcattttcaagaccctgccctgcagctaagtgacctgtactttgtggaacccaagtggctttgtaaagtcatggcacagatcttgacagtgaaggtagacggctgtctgaaacatcctaagggcatcatttcccggagagatgtggaaaaattcctttcaaagaagaagcgattcccgaagaactatatgatgcaatactttaaactattagaaaaatttcagatcgcattgccaataggggaagaatatcttctggttccaagcagcttgtctgaccacaggccagtgatagagctcccccactgtgagaactctgagatcatcatccggctgtacgaaatgccgtactttcccatgggattttggtcaagattgattaaccgattacttgaaatctcacccttcatgctttctggcagagagagagcactacgccctaacaggatgtattggcggcaaggcatctacttgaattggtctccagaagcatactgtctggtaggctctgaagtcttagacaatcgacctgagagtttcttgaaaatcacagttccgtcttgtagaaaaggttgtattcttctgggccgagttgtggatcatattgactcactcatggaagaatggtttcccgggttactggagattgacatttgtggggaaggagaaactctgttgaagaaatgggcattgtacagttttaatgatggtgaagaacatcagaagatcttgcttgatgagttgatgaagaaggctgaagaaggagacctgttaataaatccagaccaaccaaggctcactattccaatatcccagattgctccggacttgatcttggctgacctgcctagaaatatcatgttgaacaatgatgagttggaatttgaggaagcaccagagtttctcttaggcgatggaagttttggatccgtttatcgagctgcctacgaaggagaggaagtggctgtgaagatttttaataagcacacatctcttaggctgttaagacaagagttggtggtcctttgtcaccttcaccaccccagcctgatatccttgctggcggctggtattcgtcctcggatgttggtaatggagttggcctccaaaggttccttggatcgcctgctgcagcaggacaaagccagcctcaccagaaccctccagcacaggatcgcgttgcatgtggccgacggcctgaggtatctccactcagccatgattatttaccgtgacctgaagccccacaatgtgctgctttttaccctgtatcccaatgctgccatcattgcgaagattgcggactacgggatcgcacagtactgctgcaggatgggaataaagacatcagagggcaccccagggttccgggcacctgaagttgccagggggaatgtcatttataaccaacaggccgatgtttattcttttggcttactacttcacgatatttggacaactgggagtaggattatggagggtttgaggttcccaaatgagtttgatgagttagccatacaagggaagttgccagatccagttaaagaatatggctgtgccccatggcctatggttgagaagttaattacaaagtgtttgaaagaaaatcctcaagaaagacccacttctgcccaggtctttgacattttgaattcggctgaattaatttgcctcatgcgacacattttaatacctaagaacatcattgttgaatgcatggttgccacgaatctcaatagcaagagtgcgactctctggttgggatgtgggaacacagaaaaaggacagctttccttatttgacttaaacacggaaagatacagctatgaggaagttgctgatagtagaatactgtgcttggctttggtgcatctcgctgctgagaaagagagctgggttgtgtgcgggacacagtctggggctctcctggtcatcaatgttgaagaggagacaaagagacacaccctggaaaagatgactgattctgtcacttgtttgcattgcaattcccttgccaagcagagcaagcaaagtaactttcttttggtgggaactgctgatggtaacttaatgatatttgaagataaagccgttaagtgtaaaggagctgcccccttgaagacactacacataggcgatgtcagtacgcccctgatgtgcctgagcgagtccctgaattcatctgaaagacacatcacatggggagggtgtggcacaaaggtcttctccttttccaatgatttcaccattcagaaactcatcgagacaaaaaccaaccagctgttttcttacgcagctttcagcgattctaacatcatagcgctggcagtagacacagccctgtatattgccaagaaaaacagccctgtcgtagaggtgtgggacaagaaaacagaaaagctctgtgaattaatagactgtgtgcacttcttaaaggaggtgatggtaaaactaaacaaggaatcgaaacatcagctgtcctactctgggagggtgaaggccctctgcctgcagaagaacacggctctctggatcggaactggaggaggccacatcttactcctggatctttctactcggcgagttatccgcaccattcacaatttctgtgattctgtgagagccatggccacagcacaattaggaagccttaagaatgtcatgctggttttggggtacaagcggaagagtacagagggtatccaagaacaaaaagagatacaatcttgtttgtctatttgggacctcaatcttccacacgaggtgcaaaatttagaaaaacacattgaagtaagaacagaattagctgataaaatgaggaaaacatctgttgaatagaaagacatcaggcagtctcgatgttatattgaataagacatcagacatcctcgtcactatattgaaaaggacatcagacatcctcgccaatatgttagaaaatgtactcttctttttaaaatatatttttaaaatgtttacattgaaaagagtatgcctattctttacaaagttcatatgtatatgaaggaatgtgtatgtcttatgtttaatttaatatatgtaaaaatatttatcagtaaatatgttttaaaaaactatttaatttagcattatattttctatactccttaactaatttgaagggataaacaaaagaaatctacaaagcatttaatttcagtatttatactaaaattaataaaaatatcatgtttgttttgctatgtattgtgatgataaagcctattttaaattgttgattaagacacagatgttgcttgattatctatggactcagcggagtagaataaaatatctggtcaatttccaagtaagagactctttcatatcttgttttcaagtgaattatcatcattaatgtaaactgtcatattttcactaataaagatttttgttagctcaggaaa

SEQ ID NO: 6 - DNA, 8231 bp, Mus musculus
tttcctgagctaacaaaaatctttattagtgaaaatatgacagtttacattaatgatgataattcacttgaaaacaagatatgaaagagtctcttacttggaaattgaccagatattttattctactccgctgagtccatagataatcaagcaacatctgtgtcttaatcaacaatttaaaataggctttatcatcacaatacatagcaaaacaaacatgatatttttattaattttagtataaatactgaaattaaatgctttgtagatttcttttgtttatcccttcaaattagttaaggagtatagaaaatataatgctaaattaaatagttttttaaaacatatttactgataaatatttttacatatattaaattaaacataagacatacacattccttcatatacatatgaactttgtaaagaataggcatactcttttcaatgtaaacattttaaaaatatattttaaaaagaagagtacattttctaacatattggcgaggatgtctgatgtccttttcaatatagtgacgaggatgtctgatgtcttattcaatataacatcgagactgcctgatgtctttctattcaacagatgttttcctcattttatcagctaattctgttcttacttcaatgtgtttttctaaattttgcacctcgtgtggaagattgaggtcccaaatagacaaacaagattgtatctctttttgttcttggataccctctgtactcttccgcttgtaccccaaaaccagcatgacattcttaaggcttcctaattgtgctgtggccatggctctcacagaatcacagaaattgtgaatggtgcggataactcgccgagtagaaagatccaggagtaagatgtggcctcctccagttccgatccagagagccgtgttcttctgcaggcagagggccttcaccctcccagagtaggacagctgatgtttcgattccttgtttagttttaccatcacctcctttaagaagtgcacacagtctattaattcacagagcttttctgttttcttgtcccacacctctacgacagggctgtttttcttggcaatatacagggctgtgtctactgccagcgctatgatgttagaatcgctgaaagctgcgtaagaaaacagctggttggtttttgtctcgatgagtttctgaatggtgaaatcattggaaaaggagaagacctttgtgccacaccctccccatgtgatgtgtctttcagatgaattcagggactcgctcaggcacatcaggggcgtactgacatcgcctatgtgtagtgtcttcaagggggcagctcctttacacttaacggctttatcttcaaatatcattaagttaccatcagcagttcccaccaaaagaaagttactttgcttgctctgcttggcaagggaattgcaatgcaaacaagtgacagaatcagtcatcttttccagggtgtgtctctttgtctcctcttcaacattgatgaccaggagagccccagactgtgtcccgcacacaacccagctctctttctcagcagcgagatgcaccaaagccaagcacagtattctactatcagcaacttcctcatagctgtatctttccgtgtttaagtcaaataaggaaagctgtcctttttctgtgttcccacatcccaaccagagagtcgcactcttgctattgagattcgtggcaaccatgcattcaacaatgatgttcttaggtattaaaatgtgtcgcatgaggcaaattaattcagccgaattcaaaatgtcaaagacctgggcagaagtgggtctttcttgaggattttctttcaaacactttgtaattaacttctcaaccataggccatggggcacagccatattctttaactggatctggcaacttcccttgtatggctaactcatcaaactcatttgggaacctcaaaccctccataatcctactcccagttgtccaaatatcgtgaagtagtaagccaaaagaataaacatcggcctgttggttataaatgacattccccctggcaacttcaggtgcccggaaccctggggtgccctctgatgtctttattcccatcctgcagcagtactgtgcgatcccgtagtccgcaatcttcgcaatgatggcagcattgggatacagggtaaaaagcagcacattgtggggcttcaggtcacggtaaataatcatggctgagtggagatacctcaggccgtcggccacatgcaacgcgatcctgtgctggagggttctggtgaggctggctttgtcctgctgcagcaggcgatccaaggaacctttggaggccaactccattaccaacatccgaggacgaataccagccgccagcaaggatatcaggctggggtggtgaaggtgacaaaggaccaccaactcttgtcttaacagcctaagagatgtgtgcttattaaaaatcttcacagccacttcctctccttcgtaggcagctcgataaacggatccaaaacttccatcgcctaagagaaactctggtgcttcctcaaattccaactcatcattgttcaacatgatatttctaggcaggtcagccaagatcaagtccggagcaatctgggatattggaatagtgagccttggttggtctggatttattaacaggtctccttcttcagccttcttcatcaactcatcaagcaagatcttctgatgttcttcaccatcattaaaactgtacaatgcccatttcttcaacagagtttctccttccccacaaatgtcaatctccagtaacccgggaaaccattcttccatgagtgagtcaatatgatccacaactcggcccagaagaatacaaccttttctacaagacggaactgtgattttcaagaaactctcaggtcgattgtctaagacttcagagcctaccagacagtatgcttctggagaccaattcaagtagatgccttgccgccaatacatcctgttagggcgtagtgctctctctctgccagaaagcatgaagggtgagatttcaagtaatcggttaatcaatcttgaccaaaatcccatgggaaagtacggcatttcgtacagccggatgatgatctcagagttctcacagtgggggagctctatcactggcctgtggtcagacaagctgcttggaaccagaagatattcttcccctattggcaatgcgatctgaaatttttctaatagtttaaagtattgcatcatatagttcttcgggaatcgcttcttctttgaaaggaatttttccacatctctccgggaaatgatgcccttaggatgtttcagacagccgtctaccttcactgtcaagatctgtgccatgactttacaaagccacttgggttccacaaagtacaggtcacttagctgcagggcagggtcttgaaaatgcagaagaactcccgactcatttaggaagtgaacggcgtgtgggagctcgttctcatccagctgcagctgatgttcgttcacgagctgtaacaggtgtttccggttaatcacaggaaactcagtcggcacagctttccgctctgataaaatgattttctccagttctacgtagcaatctggaattagctgcccaaccacaggctgatctcggatcttgaaattaaggctctcatttatgatggttttccgaagctttgccagcgcatctgactcctcggtggcattcacaaagtggtagtcccggatggtggggaatcctcgcttatttaggagttccttcgtgattttgcttatgcacgctttccgctgcttctcatcagaaacatccaaatgtgtgcccaccagaatcaccggggaagaagaggcacgagccttgatattgaagagccagggcttcatggcgtccacctctgcctgccccttgctgagatcatagacagccaggtagagggctctctgggtcatgaagtgggggtgagtgctgtagaattcctcacgacctgcaaaatcccacacgtttagaaccaggtcctttctccttttgccccgtatttggatggaccagtctcgcacgtctatgccgactgtggcaccctgcatgccaagttctggtttcttcattttcatgagttgttgcagtaaagtggtcttaccgctccccgtatttcccacaatcatgagcttcattcggttgtagggtacagcctttttcagacgttgttgtagaaaccttatgatgtctttggccttgcatcctacgtgcttaaagtcaaaattcagatgcagtccgtccaagggaagatcccatatcttgctcaacttccccatttcatttgggaaggacctcagttccaagttgtaactgacgtcgagagacgtcagattttcaaggcagccaatttctggaggaatctctttcagtttattatgagagagatgcagtttctctactcttgaccacacgtgtgggttctcactaaagtctaaggtgctgatctgattcttgctaaaaatgagttcccttaagttcagagacttccaatgtgcaggtcccggcagacattcaatgttgttgtggctcatatccaaggaccgcaagtgcggaagactgaaaatcgcttctggaatgcacgtgaaagagttctgagacaattttaagctcgttatggaagaaggtaaggcaggcattgcagcaagaaaattcatgcgagcactgaaactctcgacttttgaacaagcctcaagaaaatctccaggtagggatggaatgtgatttttactaagatttaaaatcttcagttccttcaggctcaggggagagcaaatcccggatattttatttccttccagtaggagctgctcaagtttctccaccacttgggcaagattctctgggattgaagagagctggttataggacagattcaactgtttgaggcttggacacttcatcgcagggtctaaaactactgttggcccgatgtcatttcgagaggcatctaggttggtgatacgtggcattttcaacacgaaagagggaaatgaggtgaatttgttactgtgcaaatccaagtgtatcaaacacttcagagtctcacacagctgctgtgggaagctcgtgagtgaattctggtgaagttccagtttggtgagatgttccaggtggctactgaggcaacacttctggctcagagcatcaatatctttgagttcgttggcagataggtctaacgacgtgatgtgttctctctcagaagccagggaagaagagctatctgattgcctcatatgggacggcagccttgaggacctgagagactcatctgaagacagtatttttctttttcgtctcagtaagtcttcatggtcaaaaacaggacccagcgaattggaatgcctctgagcatttggtgagcagcgctgcagagctagatctctgtaaacttcccctacactaattgagttggacttcctcttcacgagaaatgagctctcgctgccttcgctatccagatcatcgctctggccaaacacactgtccatagaagagtcgggaataaaggtccattctccaaatttcgccagcgcgtcttcagaaaacttgccgtcactgcctgaggccacgccttcttgaagggtgtttctcatctgataccggagcactttcctcgctaggacagatcctgtgtttgtttgcttccttaaattggatgacttatctggaaataaaggaccaagccaagaaggatcaatttttcctatgccaaatcctccaaggcaaatgctgttgttggccaggtccagggcaagtttcctgaggagcaagctgatgacctggctgtcgcccttttggatgcttacggtcagggccttccgtacatcttgttcacgacaaccaccattaagcaacagttccaccaatttaggactgctctctttctcacatacctgatagattaaagaagttgcccccttcacttggttggcatcagctcccaagaggagcaaacattcaaccatgatgctgttattctgatcgcaggctctctctagcatggtgtttttcagctcatcatccacggccacttttgcaaagcatttgcaacatagattgaggaactgctcatccttttgttctacaacactggaagacatctgatgaaatatcaccacatcaaaggaatagtgcactagcagcttggagaaagatactgacagctcaagtattgacagggttgtctgtaatcctgtagtctgcacctcagcaacatctttaaagcgctgcaaagtggaagccagaatttttgccaggaggtgccctgtccctatgcagaaattcttctttgtcatcaagcatcccataaggtgtaagcccagacactgaatttcttggtcatctggatacatctgtaaggtgtggaggactgagtcaactgctccttgcagggacaatgtctctgtggcatcaggaaggtgcgcgagagaagagattactttcaatccacatttctgaatcccaggattcccaatgaacctgttcagagcgactagaaccagcttgtggatgtcagtcctgaaacactgttttctgagcacatttggtctgcattgagagtcctccctggattcttccaatagtcctggcacaacgaaatgcaagatagctcgcagcgcctccagctggactgacagagacgttccgtgggctttcatcactgttagtattttagggaccactgctgccattgtatccagagaagggttacttccttcaaacaggtgactcagcatcttgcagccactctctgccacctcaggcgcatgggcatgcttctgcatcaattccaagacattcaggtatactccttttgccagcaggattttcctgaaattaacattttgttccaagagagtggacagagcatgtgcagctgcttggaagacatctttggaagaagagtgcatcagcatagacagcatcacttccctgtgcgcagggaactggccatcttcatctccgatcttctcatgcaaactgttctggtacataaggaggttatttagtgcccagcaggcagcctcctgcacgtgtttgtcctttcgatggcgcaccagggctttatagcagggttccagccagaaaagcttctcactgtcttcctcttcgctctgctcttgagtctcacttctttcctccaagtcttggtttaagaaaatagtctcagtgaggagtgctaaacagctgagtgcagagatctgtaaggctgcgttctcaggatactgtcggaccgctttcaccacaaagacatgcacttcgttcaacaccaggatgttgaaaaagttacctaatgtaagcttctggaacaaggagcagctcacctcttggatgttttcattggtggggaaggctttcatggcctccaccacaagattgtagcaccggacattcccactcatgaggacctctacattgctgcatgtaaccgccagggaatgcaagcagcaaagtacgtggtacacaatctccttgtcccttctgaagctgccgaacgtactcagcagtatcgtgtaatctttgttctccacaaactcagtcagctgttcctcggaaactctctcaaaaagcacgtgtaaagctttgcatcccagtttttggacttcatcattggctgaatatctgtgcatggcatcaaaaattaacaagaaaatatcacattcttcatccagtatcagcaaggtgagtttacctgaatctaggaggagatccaaggcttttagtccaactattgacaggtttacattggcgtgatgaacagttaacattttaagaatcagccggtgaataccaaggacttcccaatcatttccaatatcctggggtcctattaagctttgcaatgtccctggacagacttctattaatttgcacagaagtgaccaccccgcctgctgtacactggcaactctcatgtaggagtccaggacaatcaacagaggcacgtggaaatttttatcttcaaataacttggaggcgcggtccgagtaggtgaacaccagcatgtcctccaggagctgaagcaacgtctcgatctgcttgccttcctggacattattcagcctgactatcaacttcttcagagcctcctcctcctcttcctcttcgcagccctgacaggcgccactggccatggtgcagccggcggggactgcggcgagctgggacggctcctgctctcagagctgctc

SEQ ID NO: 7 - DNA, 7581 bp, Rattus norvegicus
atggccagtggcgcctgtcagggctgcgacgaggaagaggaggaggaggctctgaagaagttgatagtcaggctgaataatgtccaggaaggcaagcagatcgagacgttgctccagctcctggaggacattctggtgttcacctactccgaccgcgcctccaagttatttgaaggcaaaaatgtccacgtgcctctgttgatagtcctggactcctacatgagagtcgccagtgtgcagcaggtggggtggtcacttctgtgcaaattaatagaagtctgtccagggacattgcaaagcttaataggaccccaggatattgggaatgattgggaagtccttggtattcaccgactgattcttaaaatgttaactgttcatcatgccaacgtaaacctgtcaatagttggactaaaagccttagatctcctcctagattcaggtaaaattactctgctgatactggatgaagaatgtgatgttttcctgttaatttttgatgccatgcacagatattcagccaacgaggaagtccagaagcttgcgtgcaaggctttacatgtgctgttcgagagagtgtccgaggagcaactgactgagtttgtggagaacaaagattacatgaccctgctgagtacgttccgcagcttcaagagggacgaggagattgtgcaccatgtactctgctgcctgcattctctggccgtcacttgcagcaatgtggaggtcctcatgagtgggaatgtcaggtgttacaatattgtggtggaagccatgaaaacattccccaccagtgaaaacattcaagaggtgagctgctccttgctccacaagcttacattaggtaattttttcaacatcctggtgttgaacgaagtccatgtctttgtggtgaaagccgtccagcggtatcccgagaacgtagccttacagatctctgcactcagctgcttagccctcctcaccgagactattttcttaaaccaagacctggaagaaagaagtgagactcaggaaaacagcgatgaggacagtgagaagcctttctggttggaaccctgctataaagccctgatgcgccatcgaaagaacaaacacgtgcaggaggccgcctgctgggccctaaataatctcctcatgtaccagagcagtttgcacgagaagattggagatgaagatggccagttcccggcgcacagggaagtgatgctgtctatgctgatgcactcttcttccaaagacgtcttccaagcagctgcgcatgctctgtccactctcttggaacaaaacgttaatttcaggaaaatcctgcttgcaaaaggagtgtacctgaatgtcttggagttgatgcagcggcacgcccaggttcctgaggtggcagagagtggctgcaagatgctgagtcatctgtttgaaggaagcaacccttctttggatacagtggcggcagtgatccccaaaatactaacagtgatgagaacccatggaacgtctctgtcagtccagctggaggcactgcgagctcttctgcattttgtggtgccgggagtatcagaagattccagggatgactcgcgatgccaaccaaacgtgctcagaacacagtgcttcaggactgacatccacaagctggttctagccgctctgaacaggttcattgggaatcccgggattcagaaatgtggattgaaagtcatctcttctttcgcacatcttcccgatgccttagagatgttatccctgcatggagcagttgactcagtcctccataccttacagatgtatccagatgaccaagaaattcagtgtctgggcttacaccttatgggatgcctgatgacaaagaagaatttctgcatagggacagggcacctcctggcaaaaattctggcttccaccttgcagcgatttaaagatgttgctgaagtacagactacaggattacagacggtcttgtcaatgcttgacctgtccgtatctttctccaagctgctagtgcactattcatttgatgtggtgatgtttcatcagatgtcttccggtgtcctggaacaaaaggatgagcagtttctcaacttatgctgcaaatgctttgcaaaagtggctgtggatgatgagctgaaaagcaagatgctagagagagcctgcgatcagaacaacagcatcatggtcgaatgtttgctcctcttgggagccgatgccaatcaagcgaagggggcaacttctttaatctatcaggtatgtgagaaagagagcagccctaaattggtggaactattgcttaacagtgggtgccgtgaacaagatgtacggaaagccctgacagtaagcatccaaaagggcgacaaccaggtcatcagcttactcctgaggagacttgccctggacctggccaacaacagcatttgccttggaggattttgcataggaaaacttgatccttcttggctaggccctttatttccagataagtcatctaatttgaggaaacaaacaaatgcggggtctgtcctagcgaggaaagtgctccggtatcagatgagaaacactcttcaagaaggcgtggcctcaggcagtgagggcaacttctctgaggatgcgctggcgaaatttggcgaatggaccttcattcccgactcttctatggacagtgtgtttggccagagtgacgatctggatagcgaaggcagcgagagctcctttctggtgaagaagaagtccaactcagttagtgtaggagaagtttacagggacctagctctgcagcgctgctcaccaaatgctcagaggcactccagttccttgggtcctgtttttgatcacgaagatctactgagacgaaaaagaaaaatactgtcctcagatgagtctctcagatcctcaaggctgcagtcccatacgagacaatcagatagctcttcttctctggcttctgagagagaacacatcacgtctttagacctttctgccaacgaactgaaagatattgatgctctgggccagaagtgttgcctcagtagccacctggagcatctcaccaagctggaacttcaccagaattcactcacgagcttcccacaacagctgtgtgagactctgaagtgcttgacacatctggatttgcacagtaacaaattcgccacctttccctccttcatgttgaaaatgccaagtgttatccacctagacgcctctcgaaatgacatcggaccaacagttgttttagaccctgtggtgaagtgtccaagcctcaaacagtttaacctgtcctacaaccagctctcttccatcccagagaacctggaccaagtggtggagaaactggagcagctcctactggaaggaaacaaaatatccgggatttgttctcccttgagcctgaaggaactgaagattttaaaccttagtaaaaaccacattccatccctacctgaagactttctcgaggcttgcccgaaagtggagagcttcagtgcccgcatgaattttctcgctgcaatgcctgccttaccgtcttccataactagcttaaaattgtctcaaaactctttcacgtgcattccagaagcgatcttcagtcttccacacttgcggtccttggatatgagtcacaacaacattgaacacctgccgggacctgcacattggaagtctctgaacttaagggaactcatttttagcaagaatcagatcagcaccttagacttgagcgaaaacccacacatatggtcaagagtagagaagctgcatctctctcataataaactgaaagagattcctccagaaattggccgtcttgaaaacctgacatctcttgatgtcagttacaacctggaactgaggtcctttccaaacgaaatggggaagttaagcaaaatatgggatcttcccttggatggactgcacctcaactttgactttaagcacataggatgcaaagccaaagacatcataaggtttctacaacaacgtctgaaaaaggccgtgccctacaaccgaatgaagctcatgattgtgggcaatacggggagtggtaagaccactctactgcagcagctcatgaaaatgaagaaatcagaactcggcatgcagggcgccacggttggcatagacgtgcgagactggcccatccaaatacgaggcaaaaggaaaaaggaccttgttctaaacgtgtgggactttgcaggccgtgaggaattctacagcactcacccccacttcatgacccagagagccctgtacctggctgtctacgacctcagcaaggggcaggcggaggtggatgccatgaagccctggctcttcaacatcaaggctcgtgcctcttcttccccggtgattctggtgggcacacatttggatgtttctgatgagaagcagcgcaaagcctgcataggcaaaatcacgaaggaactccttaataagcgaggattccccaccatccgggactaccacttcgtgaatgccactgaggagtcggatgcgctggcaaagctccggaaaaccatcataaatgagagtcttaatttcaagatccgagatcagcccgtggttgggcagctaattccagattgctacgtagaactggagaaaataatcttatcggagcgtaaagctgtaccaacggagtttcctgtaattaaccggaaacacttactccagctggtgaaggaacaccagctgcagctggatgagaacgagctcccccacgctgttcacttcctgaatgagtcaggagttcttctgcattttcaagaccccgcattgcagctgagtgacctgtactttgtggaacccaagtggctttgtaaagtcatggcacagattttgaccgtgaaagtggacggctgcctgaagcatcctaagggcatcatttcacggagagatgtggaaaaattcctttccaagaaaaagcgattccctaagaactacatggcgcagtacttcaaacttttagaaaaatttcagatcgcattaccaataggggaagaatatctgctggttccaagcagcttatctgaccacaggccagtgatagagctcccccactgtgagaactctgagatcatcatccggctgtatgaaatgccatactttccaatgggattttggtcaagattgattaaccgattacttgaaatctcacctttcatgctttctggaagagagagagcactacgcccaaaccgaatgtactggcgccaaggcatctacttgaattggtctccagaagcctactgtctggtgggctctgaagtcttagacagtcgcccagagagtttcttgaaaatcacagttccatcttgtagaaaaggttgtattcttttgggccgagttgtggatcatattgactcactcatggaagaatggtttcctggattgctggagattgacatttgtggggaaggagaaactttgttgaaaaaatgggcattgtatagttttaatgatggcgaagaacatcagaagatcttgcttgatgagttgatgaagaaggctgaagaaggagacctgttaataaatccagatcaaccaaggctcaccattccaatatcccagattgctccggacttgatcttggctgacctgcctagaaatattatgttgaacaatgacgaactggaatttgaggaagcacccgagtttctcttaggtgatggaagtttcggatcagtttatcgagctgcctacgaaggagaggaagtggctgtgaagatttttaataagcacacatcgcttaggctgttaagacaagagttggtggtactctgtcatctccaccatcccagcttgatctccctgttggcggctgggattcgtcctcggatgctggtaatggagttggcctccaagggttccttggatcgcctgctgcagcaggacaaagccagcctcacccggaccctccagcacagaatcgcattgcatgtggccgatggcctgagatatctgcactcggccatgattatttaccgtgatctgaagccccacaacgtgctactcttcaccctgtatcccaatgccgccatcattgcgaagattgcggactacgggattgcacagtactgctgtaggatgggaataaagacctcagagggcaccccagggttccgagcacctgaagttgccagaggaaatgtcatttataaccaacaggctgatgtttattcttttggcttactacttcatgatatctggacaactgggaatagaatcatggagggtttgaggtttccaaatgagtttgatgaactggccatacaagggaaattgccagacccagttaaagaatatggctgtgccccgtggcctatggttgagaagttaattacaaaatgtttgaaagaaaatcctcaagaaagacccacttctgcccaggtctttgacattttgaattcagctgagttaatttgcctcatgcgacacattttcatacctaaggacatcactgttgaatgcatagctgctacaaacctcaatagcaagcgagcgactctctggttgggctgtgggaacacagaaaaagggcagctttccttacttgacttgaacacggaaagatacagctatgaggaagttactgatagtagaatactgtgcctggctttggtgcatcttgctgctgagaaagagagctgggttgtgtgtgggacacagtccggagctctcctggtcatcaatgctgaagatgagacaaggagacacaccctcgacaagatgactgattctgttacttgcttgtattgcaattcctttgccaagcagagcaagcaaagtcacttccttttggtgggaactgctgatggcaacttaatgatatttgaagataagaccattaagtgtaaaggagctgccccattgaagacactacacataggcgatgtcagtacgcccctgatgtgcctgagcgagtccatgaattcatctgaaagacacatcacatggggagggtgtggcacaaagatcttctccttttccaatgatttcaccattcagaaactcatcgagacaagaaccaaccagctgttttcttactcagcgttcagcgattctaacatcatagcggtggcagtggacacagcgctttatattgccaagaaaaacagccctgtcgtagaggtgtgggacaagaagacagaaaaactctgtgaactaatagactgtgtgcacttcttaaaggaggtgatggtgaaaataaacaaggactcgaagcacaagctgtcctactctgggagggtgaaggcactctgcctgcagaagaacacagctctctggatcggaactggaggaggccacatcttactcctggatctttctacacggcgagtcatccgcaccatccacaatttctgtgattccgtgagagccatggccacagctcagttaggcaaccttaaaaatgtcatgctggttttggggtacaagcggaagagtacagaaggaacccaagaacaaaaagagatacaatcttgtttgtctatttgggacctcaatcttccacatgaagtgcaaaacttagaaaaacacattgaagtaagaacagaactggctgataaaatgaggaaaacatctgtcgaatag

SEQ ID NO: 8 - DNA, 7581 bp, Rattus norvegicus
ctattcgacagatgttttcctcattttatcagccagttctgttcttacttcaatgtgtttttctaagttttgcacttcatgtggaagattgaggtcccaaatagacaaacaagattgtatctctttttgttcttgggttccttctgtactcttccgcttgtaccccaaaaccagcatgacatttttaaggttgcctaactgagctgtggccatggctctcacggaatcacagaaattgtggatggtgcggatgactcgccgtgtagaaagatccaggagtaagatgtggcctcctccagttccgatccagagagctgtgttcttctgcaggcagagtgccttcaccctcccagagtaggacagcttgtgcttcgagtccttgtttattttcaccatcacctcctttaagaagtgcacacagtctattagttcacagagtttttctgtcttcttgtcccacacctctacgacagggctgtttttcttggcaatataaagcgctgtgtccactgccaccgctatgatgttagaatcgctgaacgctgagtaagaaaacagctggttggttcttgtctcgatgagtttctgaatggtgaaatcattggaaaaggagaagatctttgtgccacaccctccccatgtgatgtgtctttcagatgaattcatggactcgctcaggcacatcaggggcgtactgacatcgcctatgtgtagtgtcttcaatggggcagctcctttacacttaatggtcttatcttcaaatatcattaagttgccatcagcagttcccaccaaaaggaagtgactttgcttgctctgcttggcaaaggaattgcaatacaagcaagtaacagaatcagtcatcttgtcgagggtgtgtctccttgtctcatcttcagcattgatgaccaggagagctccggactgtgtcccacacacaacccagctctctttctcagcagcaagatgcaccaaagccaggcacagtattctactatcagtaacttcctcatagctgtatctttccgtgttcaagtcaagtaaggaaagctgccctttttctgtgttcccacagcccaaccagagagtcgctcgcttgctattgaggtttgtagcagctatgcattcaacagtgatgtccttaggtatgaaaatgtgtcgcatgaggcaaattaactcagctgaattcaaaatgtcaaagacctgggcagaagtgggtctttcttgaggattttctttcaaacattttgtaattaacttctcaaccataggccacggggcacagccatattctttaactgggtctggcaatttcccttgtatggccagttcatcaaactcatttggaaacctcaaaccctccatgattctattcccagttgtccagatatcatgaagtagtaagccaaaagaataaacatcagcctgttggttataaatgacatttcctctggcaacttcaggtgctcggaaccctggggtgccctctgaggtctttattcccatcctacagcagtactgtgcaatcccgtagtccgcaatcttcgcaatgatggcggcattgggatacagggtgaagagtagcacgttgtggggcttcagatcacggtaaataatcatggccgagtgcagatatctcaggccatcggccacatgcaatgcgattctgtgctggagggtccgggtgaggctggctttgtcctgctgcagcaggcgatccaaggaacccttggaggccaactccattaccagcatccgaggacgaatcccagccgccaacagggagatcaagctgggatggtggagatgacagagtaccaccaactcttgtcttaacagcctaagcgatgtgtgcttattaaaaatcttcacagccacttcctctccttcgtaggcagctcgataaactgatccgaaacttccatcacctaagagaaactcgggtgcttcctcaaattccagttcgtcattgttcaacataatatttctaggcaggtcagccaagatcaagtccggagcaatctgggatattggaatggtgagccttggttgatctggatttattaacaggtctccttcttcagccttcttcatcaactcatcaagcaagatcttctgatgttcttcgccatcattaaaactatacaatgcccattttttcaacaaagtttctccttccccacaaatgtcaatctccagcaatccaggaaaccattcttccatgagtgagtcaatatgatccacaactcggcccaaaagaatacaaccttttctacaagatggaactgtgattttcaagaaactctctgggcgactgtctaagacttcagagcccaccagacagtaggcttctggagaccaattcaagtagatgccttggcgccagtacattcggtttgggcgtagtgctctctctcttccagaaagcatgaaaggtgagatttcaagtaatcggttaatcaatcttgaccaaaatcccattggaaagtatggcatttcatacagccggatgatgatctcagagttctcacagtgggggagctctatcactggcctgtggtcagataagctgcttggaaccagcagatattcttcccctattggtaatgcgatctgaaatttttctaaaagtttgaagtactgcgccatgtagttcttagggaatcgctttttcttggaaaggaatttttccacatctctccgtgaaatgatgcccttaggatgcttcaggcagccgtccactttcacggtcaaaatctgtgccatgactttacaaagccacttgggttccacaaagtacaggtcactcagctgcaatgcggggtcttgaaaatgcagaagaactcctgactcattcaggaagtgaacagcgtgggggagctcgttctcatccagctgcagctggtgttccttcaccagctggagtaagtgtttccggttaattacaggaaactccgttggtacagctttacgctccgataagattattttctccagttctacgtagcaatctggaattagctgcccaaccacgggctgatctcggatcttgaaattaagactctcatttatgatggttttccggagctttgccagcgcatccgactcctcagtggcattcacgaagtggtagtcccggatggtggggaatcctcgcttattaaggagttccttcgtgattttgcctatgcaggctttgcgctgcttctcatcagaaacatccaaatgtgtgcccaccagaatcaccggggaagaagaggcacgagccttgatgttgaagagccagggcttcatggcatccacctccgcctgccccttgctgaggtcgtagacagccaggtacagggctctctgggtcatgaagtgggggtgagtgctgtagaattcctcacggcctgcaaagtcccacacgtttagaacaaggtcctttttccttttgcctcgtatttggatgggccagtctcgcacgtctatgccaaccgtggcgccctgcatgccgagttctgatttcttcattttcatgagctgctgcagtagagtggtcttaccactccccgtattgcccacaatcatgagcttcattcggttgtagggcacggcctttttcagacgttgttgtagaaaccttatgatgtctttggctttgcatcctatgtgcttaaagtcaaagttgaggtgcagtccatccaagggaagatcccatattttgcttaacttccccatttcgtttggaaaggacctcagttccaggttgtaactgacatcaagagatgtcaggttttcaagacggccaatttctggaggaatctctttcagtttattatgagagagatgcagcttctctactcttgaccatatgtgtgggttttcgctcaagtctaaggtgctgatctgattcttgctaaaaatgagttcccttaagttcagagacttccaatgtgcaggtcccggcaggtgttcaatgttgttgtgactcatatccaaggaccgcaagtgtggaagactgaagatcgcttctggaatgcacgtgaaagagttttgagacaattttaagctagttatggaagacggtaaggcaggcattgcagcgagaaaattcatgcgggcactgaagctctccactttcgggcaagcctcgagaaagtcttcaggtagggatggaatgtggtttttactaaggtttaaaatcttcagttccttcaggctcaagggagaacaaatcccggatattttgtttccttccagtaggagctgctccagtttctccaccacttggtccaggttctctgggatggaagagagctggttgtaggacaggttaaactgtttgaggcttggacacttcaccacagggtctaaaacaactgttggtccgatgtcatttcgagaggcgtctaggtggataacacttggcattttcaacatgaaggagggaaaggtggcgaatttgttactgtgcaaatccagatgtgtcaagcacttcagagtctcacacagctgttgtgggaagctcgtgagtgaattctggtgaagttccagcttggtgagatgctccaggtggctactgaggcaacacttctggcccagagcatcaatatctttcagttcgttggcagaaaggtctaaagacgtgatgtgttctctctcagaagccagagaagaagagctatctgattgtctcgtatgggactgcagccttgaggatctgagagactcatctgaggacagtatttttctttttcgtctcagtagatcttcgtgatcaaaaacaggacccaaggaactggagtgcctctgagcatttggtgagcagcgctgcagagctaggtccctgtaaacttctcctacactaactgagttggacttcttcttcaccagaaaggagctctcgctgccttcgctatccagatcgtcactctggccaaacacactgtccatagaagagtcgggaatgaaggtccattcgccaaatttcgccagcgcatcctcagagaagttgccctcactgcctgaggccacgccttcttgaagagtgtttctcatctgataccggagcactttcctcgctaggacagaccccgcatttgtttgtttcctcaaattagatgacttatctggaaataaagggcctagccaagaaggatcaagttttcctatgcaaaatcctccaaggcaaatgctgttgttggccaggtccagggcaagtctcctcaggagtaagctgatgacctggttgtcgcccttttggatgcttactgtcagggctttccgtacatcttgttcacggcacccactgttaagcaatagttccaccaatttagggctgctctctttctcacatacctgatagattaaagaagttgcccccttcgcttgattggcatcggctcccaagaggagcaaacattcgaccatgatgctgttgttctgatcgcaggctctctctagcatcttgcttttcagctcatcatccacagccacttttgcaaagcatttgcagcataagttgagaaactgctcatccttttgttccaggacaccggaagacatctgatgaaacatcaccacatcaaatgaatagtgcactagcagcttggagaaagatacggacaggtcaagcattgacaagaccgtctgtaatcctgtagtctgtacttcagcaacatctttaaatcgctgcaaggtggaagccagaatttttgccaggaggtgccctgtccctatgcagaaattcttctttgtcatcaggcatcccataaggtgtaagcccagacactgaatttcttggtcatctggatacatctgtaaggtatggaggactgagtcaactgctccatgcagggataacatctctaaggcatcgggaagatgtgcgaaagaagagatgactttcaatccacatttctgaatcccgggattcccaatgaacctgttcagagcggctagaaccagcttgtggatgtcagtcctgaagcactgtgttctgagcacgtttggttggcatcgcgagtcatccctggaatcttctgatactcccggcaccacaaaatgcagaagagctcgcagtgcctccagctggactgacagagacgttccatgggttctcatcactgttagtattttggggatcactgccgccactgtatccaaagaagggttgcttccttcaaacagatgactcagcatcttgcagccactctctgccacctcaggaacctgggcgtgccgctgcatcaactccaagacattcaggtacactccttttgcaagcaggattttcctgaaattaacgttttgttccaagagagtggacagagcatgcgcagctgcttggaagacgtctttggaagaagagtgcatcagcatagacagcatcacttccctgtgcgccgggaactggccatcttcatctccaatcttctcgtgcaaactgctctggtacatgaggagattatttagggcccagcaggcggcctcctgcacgtgtttgttctttcgatggcgcatcagggctttatagcagggttccaaccagaaaggcttctcactgtcctcatcgctgttttcctgagtctcacttctttcttccaggtcttggtttaagaaaatagtctcggtgaggagggctaagcagctgagtgcagagatctgtaaggctacgttctcgggataccgctggacggctttcaccacaaagacatggacttcgttcaacaccaggatgttgaaaaaattacctaatgtaagcttgtggagcaaggagcagctcacctcttgaatgttttcactggtggggaatgttttcatggcttccaccacaatattgtaacacctgacattcccactcatgaggacctccacattgctgcaagtgacggccagagaatgcaggcagcagagtacatggtgcacaatctcctcgtccctcttgaagctgcggaacgtactcagcagggtcatgtaatctttgttctccacaaactcagtcagttgctcctcggacactctctcgaacagcacatgtaaagccttgcacgcaagcttctggacttcctcgttggctgaatatctgtgcatggcatcaaaaattaacaggaaaacatcacattcttcatccagtatcagcagagtaattttacctgaatctaggaggagatctaaggcttttagtccaactattgacaggtttacgttggcatgatgaacagttaacattttaagaatcagtcggtgaataccaaggacttcccaatcattcccaatatcctggggtcctattaagctttgcaatgtccctggacagacttctattaatttgcacagaagtgaccaccccacctgctgcacactggcgactctcatgtaggagtccaggactatcaacagaggcacgtggacatttttgccttcaaataacttggaggcgcggtcggagtaggtgaacaccagaatgtcctccaggagctggagcaacgtctcgatctgcttgccttcctggacattattcagcctgactatcaacttcttcagagcctcctcctcctcttcctcgtcgcagccctgacaggcgccactggccat

SEQ ID NO: 9 - protein, 16 aa, Unknown
  Description of Unknown: RFGF peptide sequence
AAVALLPAVLLALLAP

SEQ ID NO: 10 - protein, 11 aa, Unknown
  Description of Unknown: RFGF analogue sequence
AALLPVLLAAP

SEQ ID NO: 11 - RNA, 21 nt, Artificial Sequence
  Description of Artificial Sequence: Synthetic oligonucleotide
acaccugaauguuuuggagua

SEQ ID NO: 12 - RNA, 21 nt, Artificial Sequence
  Description of Artificial Sequence: Synthetic oligonucleotide
agaagcauauacauucuccua

SEQ ID NO: 13 - RNA, 21 nt, Artificial Sequence
  Description of Artificial Sequence: Synthetic oligonucleotide
ucacaaacugguccuagcaga

SEQ ID NO: 14 - RNA, 21 nt, Artificial Sequence
  Description of Artificial Sequence: Synthetic oligonucleotide
ggguuuaagucuuauaggaua

SEQ ID NO: 15 - RNA, 21 nt, Artificial Sequence
  Description of Artificial Sequence: Synthetic oligonucleotide
aggauuucagacaaucuuaga

SEQ ID NO: 16 - RNA, 21 nt, Artificial Sequence
  Description of Artificial Sequence: Synthetic oligonucleotide
agcaauccucaaauugucaga

SEQ ID NO: 17 - RNA, 21 nt, Artificial Sequence
  Description of Artificial Sequence: Synthetic oligonucleotide
aaccucuguugcaaguguuua

SEQ ID NO: 18 - RNA, 21 nt, Artificial Sequence
  Description of Artificial Sequence: Synthetic oligonucleotide
accucuguugcaaguguuuua

SEQ ID NO: 19 - RNA, 21 nt, Artificial Sequence
  Description of Artificial Sequence: Synthetic oligonucleotide
gaugcuagagagagcguguga

SEQ ID NO: 20 - RNA, 21 nt, Artificial Sequence
  Description of Artificial Sequence: Synthetic oligonucleotide
ucucgugaacaagauguacga

SEQ ID NO: 21 - RNA, 21 nt, Artificial Sequence
  Description of Artificial Sequence: Synthetic oligonucleotide
ggccaacaauagcauuugcca

SEQ ID NO: 22 - RNA, 21 nt, Artificial Sequence
  Description of Artificial Sequence: Synthetic oligonucleotide
aggaaaaguugaaccuucuua

SEQ ID NO: 23 - RNA, 21 nt, Artificial Sequence
  Description of Artificial Sequence: Synthetic oligonucleotide
ggaaaaguugaaccuucuuga

SEQ ID NO: 24 - RNA, 21 nt, Artificial Sequence
  Description of Artificial Sequence: Synthetic oligonucleotide
aaaguugaaccuucuuggcua

SEQ ID NO: 25 - RNA, 21 nt, Artificial Sequence
  Description of Artificial Sequence: Synthetic oligonucleotide
uuggcuugguccuuuauuuca

SEQ ID NO: 26 - RNA, 21 nt, Artificial Sequence
  Description of Artificial Sequence: Synthetic oligonucleotide
gauaagacuucuaauuuaaga

SEQ ID NO: 27 - RNA, 21 nt, Artificial Sequence
  Description of Artificial Sequence: Synthetic oligonucleotide
gaauggugaucagauaucaga

SEQ ID NO: 28 - RNA, 21 nt, Artificial Sequence
  Description of Artificial Sequence: Synthetic oligonucleotide
uuuauuccugacucuucuaua

SEQ ID NO: 29 - RNA, 21 nt, Artificial Sequence
  Description of Artificial Sequence: Synthetic oligonucleotide
uuaguguaggagaauuuuaca

SEQ ID NO: 30 - RNA, 21 nt, Artificial Sequence
  Description of Artificial Sequence: Synthetic oligonucleotide
uuuuaccgagaugccguauua

SEQ ID NO: 31 - RNA, 21 nt, Artificial Sequence
  Description of Artificial Sequence: Synthetic oligonucleotide
uuaccgagaugccguauuaca

SEQ ID NO: 32 - RNA, 21 nt, Artificial Sequence
  Description of Artificial Sequence: Synthetic oligonucleotide
aaacuucaaucccauaugaga

SEQ ID NO: 33 - RNA, 21 nt, Artificial Sequence
  Description of Artificial Sequence: Synthetic oligonucleotide
ugcacucacgagcuuuccaca

SEQ ID NO: 34 - RNA, 21 nt, Artificial Sequence
  Description of Artificial Sequence: Synthetic oligonucleotide
cucucgaaaugacauuggaca

SEQ ID NO: 35 - RNA, 21 nt, Artificial Sequence
  Description of Artificial Sequence: Synthetic oligonucleotide
acccucagugguuuuagauca

SEQ ID NO: 36 - RNA, 21 nt, Artificial Sequence
  Description of Artificial Sequence: Synthetic oligonucleotide
aguuuaaccugucauauaaca

SEQ ID NO: 37 - RNA, 21 nt, Artificial Sequence
  Description of Artificial Sequence: Synthetic oligonucleotide
uugcugcuaugccuuucuuga

SEQ ID NO: 38 - RNA, 21 nt, Artificial Sequence
  Description of Artificial Sequence: Synthetic oligonucleotide
ugcugcuaugccuuucuugca

SEQ ID NO: 39 - RNA, 21 nt, Artificial Sequence
  Description of Artificial Sequence: Synthetic oligonucleotide
uuaaaucuuccacacuugcga

SEQ ID NO: 40 - RNA, 21 nt, Artificial Sequence
  Description of Artificial Sequence: Synthetic oligonucleotide
uaaaucuuccacacuugcgga

SEQ ID NO: 41 - RNA, 21 nt, Artificial Sequence
  Description of Artificial Sequence: Synthetic oligonucleotide
aaucuuccacacuugcgguca

SEQ ID NO: 42 - RNA, 21 nt, Artificial Sequence
  Description of Artificial Sequence: Synthetic oligonucleotide
ucuuccacacuugcggucuua

SEQ ID NO: 43 - RNA, 21 nt, Artificial Sequence
  Description of Artificial Sequence: Synthetic oligonucleotide
uccacacuugcggucuuuaga

SEQ ID NO: 44 - RNA, 21 nt, Artificial Sequence
  Description of Artificial Sequence: Synthetic oligonucleotide
uugcggucuuuagauaugaga

SEQ ID NO: 45 - RNA, 21 nt, Artificial Sequence
  Description of Artificial Sequence: Synthetic oligonucleotide
aacuuaagggaacucuuauua

SEQ ID NO: 46 - RNA, 21 nt, Artificial Sequence
  Description of Artificial Sequence: Synthetic oligonucleotide
uaagggaacucuuauuuagca

SEQ ID NO: 47 - RNA, 21 nt, Artificial Sequence
  Description of Artificial Sequence: Synthetic oligonucleotide
uaaucagaucagcaucuugga

SEQ ID NO: 48 - RNA, 21 nt, Artificial Sequence
  Description of Artificial Sequence: Synthetic oligonucleotide
aucagcaucuuggacuugaga

SEQ ID NO: 49 - RNA, 21 nt, Artificial Sequence
  Description of Artificial Sequence: Synthetic oligonucleotide
uagagaaacugcaucuuucua

SEQ ID NO: 50 - RNA, 21 nt, Artificial Sequence
  Description of Artificial Sequence: Synthetic oligonucleotide
uggaacuaagauccuuuccca

SEQ ID NO: 51 - RNA, 21 nt, Artificial Sequence
  Description of Artificial Sequence: Synthetic oligonucleotide
auaaccgaaugaaacuuauga

SEQ ID NO: 52 - RNA, 21 nt, Artificial Sequence
  Description of Artificial Sequence: Synthetic oligonucleotide
caauauaaaggcucgcgcuua

SEQ ID NO: 53 - RNA, 21 nt, Artificial Sequence
  Description of Artificial Sequence: Synthetic oligonucleotide
auaaaggcucgcgcuucuuca

SEQ ID NO: 54 - RNA, 21 nt, Artificial Sequence
  Description of Artificial Sequence: Synthetic oligonucleotide
aaaggcucgcgcuucuucuua

SEQ ID NO: 55 - RNA, 21 nt, Artificial Sequence
  Description of Artificial Sequence: Synthetic oligonucleotide
uucucguuggcacacauuuga

SEQ ID NO: 56 - RNA, 21 nt, Artificial Sequence
  Description of Artificial Sequence: Synthetic oligonucleotide
cacacauuuggauguuucuga

SEQ ID NO: 57 - RNA, 21 nt, Artificial Sequence
  Description of Artificial Sequence: Synthetic oligonucleotide
augcuuuggcaaaacuucgga

SEQ ID NO: 58 - RNA, 21 nt, Artificial Sequence
  Description of Artificial Sequence: Synthetic oligonucleotide
acgagagccuuaauuucaaga

SEQ ID NO: 59 - RNA, 21 nt, Artificial Sequence
  Description of Artificial Sequence: Synthetic oligonucleotide
aaucaggaguccuucuucaua

SEQ ID NO: 60 - RNA, 21 nt, Artificial Sequence
  Description of Artificial Sequence: Synthetic oligonucleotide
aaucauggcacagauuuugaa

SEQ ID NO: 61 - RNA, 21 nt, Artificial Sequence
  Description of Artificial Sequence: Synthetic oligonucleotide
cagugaaaguggaagguugua

SEQ ID NO: 62 - RNA, 21 nt, Artificial Sequence
  Description of Artificial Sequence: Synthetic oligonucleotide
agugaaaguggaagguuguca

SEQ ID NO: 63 - RNA, 21 nt, Artificial Sequence
  Description of Artificial Sequence: Synthetic oligonucleotide
gugaaaguggaagguugucca

SEQ ID NO: 64 - RNA, 21 nt, Artificial Sequence
  Description of Artificial Sequence: Synthetic oligonucleotide
cuagaaaaauuccagauugca

SEQ ID NO: 65 - RNA, 21 nt, Artificial Sequence
  Description of Artificial Sequence: Synthetic oligonucleotide
aauuaucauccgacuauauga

SEQ ID NO: 66 - RNA, 21 nt, Artificial Sequence
  Description of Artificial Sequence: Synthetic oligonucleotide
gccuuauuuuccaaugggaua

SEQ ID NO: 67 - RNA, 21 nt, Artificial Sequence
  Description of Artificial Sequence: Synthetic oligonucleotide
uuuuccaaugggauuuuggua

SEQ ID NO: 68 - RNA, 21 nt, Artificial Sequence
  Description of Artificial Sequence: Synthetic oligonucleotide
uuuccaaugggauuuugguca

SEQ ID NO: 69 - RNA, 21 nt, Artificial Sequence
  Description of Artificial Sequence: Synthetic oligonucleotide
uugagauuucaccuuacauga

SEQ ID NO: 70 - RNA, 21 nt, Artificial Sequence
  Description of Artificial Sequence: Synthetic oligonucleotide
gcccaaacagaauguauugga

SEQ ID NO: 71 - RNA, 21 nt, Artificial Sequence
  Description of Artificial Sequence: Synthetic oligonucleotide
ugaagcuuauugucugguaga

SEQ ID NO: 72 - RNA, 21 nt, Artificial Sequence
  Description of Artificial Sequence: Synthetic oligonucleotide
gaagcuuauugucugguagga

SEQ ID NO: 73 - RNA, 21 nt, Artificial Sequence
  Description of Artificial Sequence: Synthetic oligonucleotide
agcuuauugucugguaggaua

SEQ ID NO: 74 - RNA, 21 nt, Artificial Sequence
  Description of Artificial Sequence: Synthetic oligonucleotide
uuauugucugguaggaucuga

SEQ ID NO: 75 - RNA, 21 nt, Artificial Sequence
  Description of Artificial Sequence: Synthetic oligonucleotide
aaaauuacaguuccuucuuga

SEQ ID NO: 76 - RNA, 21 nt, Artificial Sequence
  Description of Artificial Sequence: Synthetic oligonucleotide
uguagaaaaggcuguauucua

SEQ ID NO: 77 - RNA, 21 nt, Artificial Sequence
  Description of Artificial Sequence: Synthetic oligonucleotide
uauucuuuugggccaaguuga

SEQ ID NO: 78 - RNA, 21 nt, Artificial Sequence
  Description of Artificial Sequence: Synthetic oligonucleotide
cuuuugggccaaguuguggaa

SEQ ID NO: 79 - RNA, 21 nt, Artificial Sequence
  Description of Artificial Sequence: Synthetic oligonucleotide
aaguuguggaccacauugaua

SEQ ID NO: 80 - RNA, 21 nt, Artificial Sequence
  Description of Artificial Sequence: Synthetic oligonucleotide
uguggaccacauugauucuca

SEQ ID NO: 81 - RNA, 21 nt, Artificial Sequence
  Description of Artificial Sequence: Synthetic oligonucleotide
aagaaugguuuccuggguuga

SEQ ID NO: 82 - RNA, 21 nt, Artificial Sequence
  Description of Artificial Sequence: Synthetic oligonucleotide
uugaagaaaugggcauuauaa

SEQ ID NO: 83 - RNA, 21 nt, Artificial Sequence
  Description of Artificial Sequence: Synthetic oligonucleotide
ggaaggagaucucuuaguaaa

SEQ ID NO: 84 - RNA, 21 nt, Artificial Sequence
  Description of Artificial Sequence: Synthetic oligonucleotide
agaucucuuaguaaauccaga

SEQ ID NO: 85 - RNA, 21 nt, Artificial Sequence
  Description of Artificial Sequence: Synthetic oligonucleotide
aauccagaucaaccaaggcua

SEQ ID NO: 86 - RNA, 21 nt, Artificial Sequence
  Description of Artificial Sequence: Synthetic oligonucleotide
aggcucaccauuccaauauca

SEQ ID NO: 87 - RNA, 21 nt, Artificial Sequence
  Description of Artificial Sequence: Synthetic oligonucleotide
ggcucaccauuccaauaucua

SEQ ID NO: 88 - RNA, 21 nt, Artificial Sequence
  Description of Artificial Sequence: Synthetic oligonucleotide
gcucaccauuccaauaucuca

SEQ ID NO: 89 - RNA, 21 nt, Artificial Sequence
  Description of Artificial Sequence: Synthetic oligonucleotide
cauuccaauaucucagauuga

SEQ ID NO: 90 - RNA, 21 nt, Artificial Sequence
  Description of Artificial Sequence: Synthetic oligonucleotide
uuccaauaucucagauugcca

SEQ ID NO: 91 - RNA, 21 nt, Artificial Sequence
  Description of Artificial Sequence: Synthetic oligonucleotide
gaccugccuagaaauauuaua

SEQ ID NO: 92 - RNA, 21 nt, Artificial Sequence
  Description of Artificial Sequence: Synthetic oligonucleotide
cugccuagaaauauuauguua

SEQ ID NO: 93 - RNA, 21 nt, Artificial Sequence
  Description of Artificial Sequence: Synthetic oligonucleotide
agaguuucuccuaggugauga

SEQ ID NO: 94 - RNA, 21 nt, Artificial Sequence
  Description of Artificial Sequence: Synthetic oligonucleotide
gaguuucuccuaggugaugga

SEQ ID NO: 95 - RNA, 21 nt, Artificial Sequence
  Description of Artificial Sequence: Synthetic oligonucleotide
ugauggcaguuuuggaucaga

SEQ ID NO: 96 - RNA, 21 nt, Artificial Sequence
  Description of Artificial Sequence: Synthetic oligonucleotide
gauguuggugauggaguuaga

SEQ ID NO: 97 - RNA, 21 nt, Artificial Sequence
  Description of Artificial Sequence: Synthetic oligonucleotide
auguuggugauggaguuagca

SEQ ID NO: 98 - RNA, 21 nt, Artificial Sequence
  Description of Artificial Sequence: Synthetic oligonucleotide
ccuccaaggguuccuuggaua

SEQ ID NO: 99 - RNA, 21 nt, Artificial Sequence
  Description of Artificial Sequence: Synthetic oligonucleotide
gccucacuagaacccuacaga

SEQ ID NO: 100 - RNA, 21 nt, Artificial Sequence
  Description of Artificial Sequence: Synthetic oligonucleotide
acucagccaugauuauauaca

SEQ ID NO: 101 - RNA, 21 nt, Artificial Sequence
  Description of Artificial Sequence: Synthetic oligonucleotide
cucagccaugauuauauacca

SEQ ID NO: 102 - RNA, 21 nt, Artificial Sequence
  Description of Artificial Sequence: Synthetic oligonucleotide
ucagccaugauuauauaccga

SEQ ID NO: 103 - RNA, 21 nt, Artificial Sequence
  Description of Artificial Sequence: Synthetic oligonucleotide
agccaugauuauauaccgaga

SEQ ID NO: 104 - RNA, 21 nt, Artificial Sequence
  Description of Artificial Sequence: Synthetic oligonucleotide
cacaaugugcugcuuuucaca

SEQ ID NO: 105 - RNA, 21 nt, Artificial Sequence
  Description of Artificial Sequence: Synthetic oligonucleotide
ucacacuguaucccaaugcua

SEQ ID NO: 106 - RNA, 21 nt, Artificial Sequence
  Description of Artificial Sequence: Synthetic oligonucleotide
caucauugcaaagauugcuga

SEQ ID NO: 107 - RNA, 21 nt, Artificial Sequence
  Description of Artificial Sequence: Synthetic oligonucleotide
gcaaagauugcugacuacgga

SEQ ID NO: 108 - RNA, 21 nt, Artificial Sequence
  Description of Artificial Sequence: Synthetic oligonucleotide
caaagauugcugacuacggca

SEQ ID NO: 109 - RNA, 21 nt, Artificial Sequence
  Description of Artificial Sequence: Synthetic oligonucleotide
aaagauugcugacuacggcaa

SEQ ID NO: 110 - RNA, 21 nt, Artificial Sequence
  Description of Artificial Sequence: Synthetic oligonucleotide
aagauugcugacuacggcaua

SEQ ID NO: 111 - RNA, 21 nt, Artificial Sequence
  Description of Artificial Sequence: Synthetic oligonucleotide
ucaguacugcuguagaaugga

SEQ ID NO: 112 - RNA, 21 nt, Artificial Sequence
  Description of Artificial Sequence: Synthetic oligonucleotide
cuacucuaugacauuuugaca

SEQ ID NO: 113 - RNA, 21 nt, Artificial Sequence
  Description of Artificial Sequence: Synthetic oligonucleotide
aacuggagguagaauaguaga

SEQ ID NO: 114 - RNA, 21 nt, Artificial Sequence
  Description of Artificial Sequence: Synthetic oligonucleotide
ccaguuaaagaauaugguuga

SEQ ID NO: 115 - RNA, 21 nt, Artificial Sequence
  Description of Artificial Sequence: Synthetic oligonucleotide
gaauucagcugaauuagucua

SEQ ID NO: 116 - RNA, 21 nt, Artificial Sequence
  Description of Artificial Sequence: Synthetic oligonucleotide
cagcugaauuagucugucuga

SEQ ID NO: 117 - RNA, 21 nt, Artificial Sequence
  Description of Artificial Sequence: Synthetic oligonucleotide
gaauuagucugucugacgaga

SEQ ID NO: 118 - RNA, 21 nt, Artificial Sequence
  Description of Artificial Sequence: Synthetic oligonucleotide
accuaaaaacguaauuguuga

SEQ ID NO: 119 - RNA, 21 nt, Artificial Sequence
  Description of Artificial Sequence: Synthetic oligonucleotide
gaggacagcucucauuucuua

SEQ ID NO: 120 - RNA, 21 nt, Artificial Sequence
  Description of Artificial Sequence: Synthetic oligonucleotide
auauugugcuuagccuuggua

SEQ ID NO: 121 - RNA, 21 nt, Artificial Sequence
  Description of Artificial Sequence: Synthetic oligonucleotide
uagccuuggugcaucuuccua

SEQ ID NO: 122 - RNA, 21 nt, Artificial Sequence
  Description of Artificial Sequence: Synthetic oligonucleotide
gccuuggugcaucuuccugua

SEQ ID NO: 123 - RNA, 21 nt, Artificial Sequence
  Description of Artificial Sequence: Synthetic oligonucleotide
ugggacacagucugguacuca

SEQ ID NO: 124 - RNA, 21 nt, Artificial Sequence
  Description of Artificial Sequence: Synthetic oligonucleotide
cacagucugguacucuccuga

SEQ ID NO: 125 - RNA, 21 nt, Artificial Sequence
  Description of Artificial Sequence: Synthetic oligonucleotide
cucuccuggucaucaauacca

SEQ ID NO: 126 - RNA, 21 nt, Artificial Sequence
  Description of Artificial Sequence: Synthetic oligonucleotide
ucuccuggucaucaauaccga

SEQ ID NO: 127 - RNA, 21 nt, Artificial Sequence
  Description of Artificial Sequence: Synthetic oligonucleotide
cuccuggucaucaauaccgaa

SEQ ID NO: 128 - RNA, 21 nt, Artificial Sequence
  Description of Artificial Sequence: Synthetic oligonucleotide
ccuggucaucaauaccgaaga

SEQ ID NO: 129 - RNA, 21 nt, Artificial Sequence
  Description of Artificial Sequence: Synthetic oligonucleotide
ggucaucaauaccgaagauga

SEQ ID NO: 130 - RNA, 21 nt, Artificial Sequence
  Description of Artificial Sequence: Synthetic oligonucleotide
gucaucaauaccgaagaugga

SEQ ID NO: 131 - RNA, 21 nt, Artificial Sequence
  Description of Artificial Sequence: Synthetic oligonucleotide
ucaucaauaccgaagauggga

SEQ ID NO: 132 - RNA, 21 nt, Artificial Sequence
  Description of Artificial Sequence: Synthetic oligonucleotide
auaccgaagaugggaaaaaga

SEQ ID NO: 133 - RNA, 21 nt, Artificial Sequence
  Description of Artificial Sequence: Synthetic oligonucleotide
cuuguuuguauugcaauucca

SEQ ID NO: 134 - RNA, 21 nt, Artificial Sequence
  Description of Artificial Sequence: Synthetic oligonucleotide
uacuaaauauaggaaauguca

SEQ ID NO: 135 - RNA, 21 nt, Artificial Sequence
  Description of Artificial Sequence: Synthetic oligonucleotide
aaugucaguacuccauugaua

SEQ ID NO: 136 - RNA, 21 nt, Artificial Sequence
  Description of Artificial Sequence: Synthetic oligonucleotide
ugucaguacuccauugaugua

SEQ ID NO: 137 - RNA, 21 nt, Artificial Sequence
  Description of Artificial Sequence: Synthetic oligonucleotide
acuccauugauguguuugaga

SEQ ID NO: 138 - RNA, 21 nt, Artificial Sequence
  Description of Artificial Sequence: Synthetic oligonucleotide
cuccauugauguguuugagua

SEQ ID NO: 139 - RNA, 21 nt, Artificial Sequence
  Description of Artificial Sequence: Synthetic oligonucleotide
gaggauguggcacaaagauua

SEQ ID NO: 140 - RNA, 21 nt, Artificial Sequence
  Description of Artificial Sequence: Synthetic oligonucleotide
uuuucuccuuuucuaaugaua

SEQ ID NO: 141 - RNA, 21 nt, Artificial Sequence
  Description of Artificial Sequence: Synthetic oligonucleotide
cuaaugauuucaccauucaga

SEQ ID NO: 142 - RNA, 21 nt, Artificial Sequence
  Description of Artificial Sequence: Synthetic oligonucleotide
auuucaccauucagaaacuca

SEQ ID NO: 143 - RNA, 21 nt, Artificial Sequence
  Description of Artificial Sequence: Synthetic oligonucleotide
ccauucagaaacucauugaga

SEQ ID NO: 144 - RNA, 21 nt, Artificial Sequence
  Description of Artificial Sequence: Synthetic oligonucleotide
uagcccuguuguggaagugua

SEQ ID NO: 145 - RNA, 21 nt, Artificial Sequence
  Description of Artificial Sequence: Synthetic oligonucleotide
aaacacaaaaugucuuauuca

SEQ ID NO: 146 - RNA, 21 nt, Artificial Sequence
  Description of Artificial Sequence: Synthetic oligonucleotide
agaacacugcucuuuggauaa

SEQ ID NO: 147 - RNA, 21 nt, Artificial Sequence
  Description of Artificial Sequence: Synthetic oligonucleotide
ugcucuuuggauaggaacuga

SEQ ID NO: 148 - RNA, 21 nt, Artificial Sequence
  Description of Artificial Sequence: Synthetic oligonucleotide
gcucuuuggauaggaacugga

SEQ ID NO: 149 - RNA, 21 nt, Artificial Sequence
  Description of Artificial Sequence: Synthetic oligonucleotide
cuggaggaggccauauuuuaa

SEQ ID NO: 150 - RNA, 21 nt, Artificial Sequence
  Description of Artificial Sequence: Synthetic oligonucleotide
ccuggaucuuucaacucguca

SEQ ID NO: 151 - RNA, 21 nt, Artificial Sequence
  Description of Artificial Sequence: Synthetic oligonucleotide
cuggaucuuucaacucgucga

SEQ ID NO: 152 - RNA, 21 nt, Artificial Sequence
  Description of Artificial Sequence: Synthetic oligonucleotide
uggaucuuucaacucgucgaa

SEQ ID NO: 153 - RNA, 21 nt, Artificial Sequence
  Description of Artificial Sequence: Synthetic oligonucleotide
auucggucagagucaugauga

SEQ ID NO: 154 - RNA, 21 nt, Artificial Sequence
  Description of Artificial Sequence: Synthetic oligonucleotide
aaaaugucaugcugguauuga

SEQ ID NO: 155 - RNA, 21 nt, Artificial Sequence
  Description of Artificial Sequence: Synthetic oligonucleotide
augucaugcugguauugggca

SEQ ID NO: 156 - RNA, 21 nt, Artificial Sequence
  Description of Artificial Sequence: Synthetic oligonucleotide
ugucaugcugguauugggcua

SEQ ID NO: 157 - RNA, 21 nt, Artificial Sequence
  Description of Artificial Sequence: Synthetic oligonucleotide
gaaagagauacaaucuugcua

SEQ ID NO: 158 - RNA, 21 nt, Artificial Sequence
  Description of Artificial Sequence: Synthetic oligonucleotide
caaucuuccacaugaagugca

SEQ ID NO: 159 - RNA, 21 nt, Artificial Sequence
  Description of Artificial Sequence: Synthetic oligonucleotide
cacaugaagugcaaaauuuaa

SEQ ID NO: 160 - RNA, 21 nt, Artificial Sequence
  Description of Artificial Sequence: Synthetic oligonucleotide
acaugaagugcaaaauuuaga

SEQ ID NO: 161 - RNA, 21 nt, Artificial Sequence
  Description of Artificial Sequence: Synthetic oligonucleotide
caugaagugcaaaauuuagaa

SEQ ID NO: 162 - RNA, 21 nt, Artificial Sequence
  Description of Artificial Sequence: Synthetic oligonucleotide
agugagaaaagaauuagcuga

SEQ ID NO: 163 - RNA, 21 nt, Artificial Sequence
  Description of Artificial Sequence: Synthetic oligonucleotide
auaggaauugucuuuggauaa

SEQ ID NO: 164 - RNA, 21 nt, Artificial Sequence
  Description of Artificial Sequence: Synthetic oligonucleotide
aggaauugucuuuggauagga

SEQ ID NO: 165 - RNA, 21 nt, Artificial Sequence
  Description of Artificial Sequence: Synthetic oligonucleotide
aaaauauuaagacaguuucca

SEQ ID NO: 166 - RNA, 21 nt, Artificial Sequence
  Description of Artificial Sequence: Synthetic oligonucleotide
aaauauuaagacaguuuccca

SEQ ID NO: 167 - RNA, 23 nt, Artificial Sequence
  Description of Artificial Sequence: Synthetic oligonucleotide
uacuccaaaacauucagguguau

SEQ ID NO: 168 - RNA, 23 nt, Artificial Sequence
  Description of Artificial Sequence: Synthetic oligonucleotide
uaggagaauguauaugcuucugc

SEQ ID NO: 169 - RNA, 23 nt, Artificial Sequence
  Description of Artificial Sequence: Synthetic oligonucleotide
ucugcuaggaccaguuugugaau

SEQ ID NO: 170 - RNA, 23 nt, Artificial Sequence
  Description of Artificial Sequence: Synthetic oligonucleotide
uauccuauaagacuuaaacccag

SEQ ID NO: 171 - RNA, 23 nt, Artificial Sequence
  Description of Artificial Sequence: Synthetic oligonucleotide
ucuaagauugucugaaauccuuu

SEQ ID NO: 172 - RNA, 23 nt, Artificial Sequence
  Description of Artificial Sequence: Synthetic oligonucleotide
ucugacaauuugaggauugcuaa

SEQ ID NO: 173 - RNA, 23 nt, Artificial Sequence
  Description of Artificial Sequence: Synthetic oligonucleotide
uaaacacuugcaacagagguuua

SEQ ID NO: 174 - RNA, 23 nt, Artificial Sequence
  Description of Artificial Sequence: Synthetic oligonucleotide
uaaaacacuugcaacagagguuu

SEQ ID NO: 175 - RNA, 23 nt, Artificial Sequence
  Description of Artificial Sequence: Synthetic oligonucleotide
ucacacgcucucucuagcaucac

SEQ ID NO: 176 - RNA, 23 nt, Artificial Sequence
  Description of Artificial Sequence: Synthetic oligonucleotide
ucguacaucuuguucacgagauc

SEQ ID NO: 177 - RNA, 23 nt, Artificial Sequence
  Description of Artificial Sequence: Synthetic oligonucleotide
uggcaaaugcuauuguuggccac

SEQ ID NO: 178 - RNA, 23 nt, Artificial Sequence
  Description of Artificial Sequence: Synthetic oligonucleotide
uaagaagguucaacuuuuccuau

SEQ ID NO: 179 - RNA, 23 nt, Artificial Sequence
  Description of Artificial Sequence: Synthetic oligonucleotide
ucaagaagguucaacuuuuccua

SEQ ID NO: 180 - RNA, 23 nt, Artificial Sequence
  Description of Artificial Sequence: Synthetic oligonucleotide
uagccaagaagguucaacuuuuc

SEQ ID NO: 181 - RNA, 23 nt, Artificial Sequence
  Description of Artificial Sequence: Synthetic oligonucleotide
ugaaauaaaggaccaagccaaga

SEQ ID NO: 182 - RNA, 23 nt, Artificial Sequence
  Description of Artificial Sequence: Synthetic oligonucleotide
ucuuaaauuagaagucuuaucug

SEQ ID NO: 183 - RNA, 23 nt, Artificial Sequence
  Description of Artificial Sequence: Synthetic oligonucleotide
ucugauaucugaucaccauucuu

SEQ ID NO: 184 - RNA, 23 nt, Artificial Sequence
  Description of Artificial Sequence: Synthetic oligonucleotide
uauagaagagucaggaauaaagg

SEQ ID NO: 185 - RNA, 23 nt, Artificial Sequence
  Description of Artificial Sequence: Synthetic oligonucleotide
uguaaaauucuccuacacuaauu

SEQ ID NO: 186 - RNA, 23 nt, Artificial Sequence
  Description of Artificial Sequence: Synthetic oligonucleotide
uaauacggcaucucgguaaaauu

SEQ ID NO: 187 - RNA, 23 nt, Artificial Sequence
  Description of Artificial Sequence: Synthetic oligonucleotide
uguaauacggcaucucgguaaaa

SEQ ID NO: 188 - RNA, 23 nt, Artificial Sequence
  Description of Artificial Sequence: Synthetic oligonucleotide
ucucauaugggauugaaguuuug

SEQ ID NO: 189 - RNA, 23 nt, Artificial Sequence
  Description of Artificial Sequence: Synthetic oligonucleotide
uguggaaagcucgugagugcauu

SEQ ID NO: 190 - RNA, 23 nt, Artificial Sequence
  Description of Artificial Sequence: Synthetic oligonucleotide
uguccaaugucauuucgagagac

SEQ ID NO: 191 - RNA, 23 nt, Artificial Sequence
  Description of Artificial Sequence: Synthetic oligonucleotide
ugaucuaaaaccacugagggucc

SEQ ID NO: 192 - RNA, 23 nt, Artificial Sequence
  Description of Artificial Sequence: Synthetic oligonucleotide
uguuauaugacagguuaaacugu

SEQ ID NO: 193 - RNA, 23 nt, Artificial Sequence
  Description of Artificial Sequence: Synthetic oligonucleotide
ucaagaaaggcauagcagcaaga

SEQ ID NO: 194 - RNA, 23 nt, Artificial Sequence
  Description of Artificial Sequence: Synthetic oligonucleotide
ugcaagaaaggcauagcagcaag

SEQ ID NO: 195 - RNA, 23 nt, Artificial Sequence
  Description of Artificial Sequence: Synthetic oligonucleotide
ucgcaaguguggaagauuuaaaa

SEQ ID NO: 196 - RNA, 23 nt, Artificial Sequence
  Description of Artificial Sequence: Synthetic oligonucleotide
uccgcaaguguggaagauuuaaa

SEQ ID NO: 197 - RNA, 23 nt, Artificial Sequence
  Description of Artificial Sequence: Synthetic oligonucleotide
ugaccgcaaguguggaagauuua

SEQ ID NO: 198 - RNA, 23 nt, Artificial Sequence
  Description of Artificial Sequence: Synthetic oligonucleotide
uaagaccgcaaguguggaagauu

SEQ ID NO: 199 - RNA, 23 nt, Artificial Sequence
  Description of Artificial Sequence: Synthetic oligonucleotide
ucuaaagaccgcaaguguggaag

SEQ ID NO: 200 - RNA, 23 nt, Artificial Sequence
  Description of Artificial Sequence: Synthetic oligonucleotide
ucucauaucuaaagaccgcaagu

SEQ ID NO: 201 - RNA, 23 nt, Artificial Sequence
  Description of Artificial Sequence: Synthetic oligonucleotide
uaauaagaguucccuuaaguuca

SEQ ID NO: 202 - RNA, 23 nt, Artificial Sequence
  Description of Artificial Sequence: Synthetic oligonucleotide
ugcuaaauaagaguucccuuaag

SEQ ID NO: 203 - RNA, 23 nt, Artificial Sequence
  Description of Artificial Sequence: Synthetic oligonucleotide
uccaagaugcugaucugauuaug

SEQ ID NO: 204 - RNA, 23 nt, Artificial Sequence
  Description of Artificial Sequence: Synthetic oligonucleotide
ucucaaguccaagaugcugaucu

SEQ ID NO: 205 - RNA, 23 nt, Artificial Sequence
  Description of Artificial Sequence: Synthetic oligonucleotide
uagaaagaugcaguuucucuacu

SEQ ID NO: 206 - RNA, 23 nt, Artificial Sequence
  Description of Artificial Sequence: Synthetic oligonucleotide
ugggaaaggaucuuaguuccaag

SEQ ID NO: 207 - RNA, 23 nt, Artificial Sequence
  Description of Artificial Sequence: Synthetic oligonucleotide
ucauaaguuucauucgguuauaa

SEQ ID NO: 208 - RNA, 23 nt, Artificial Sequence
  Description of Artificial Sequence: Synthetic oligonucleotide
uaagcgcgagccuuuauauugaa

SEQ ID NO: 209 - RNA, 23 nt, Artificial Sequence
  Description of Artificial Sequence: Synthetic oligonucleotide
ugaagaagcgcgagccuuuauau

SEQ ID NO: 210 - RNA, 23 nt, Artificial Sequence
  Description of Artificial Sequence: Synthetic oligonucleotide
uaagaagaagcgcgagccuuuau

SEQ ID NO: 211 - RNA, 23 nt, Artificial Sequence
  Description of Artificial Sequence: Synthetic oligonucleotide
ucaaaugugugccaacgagaauc

SEQ ID NO: 212 - RNA, 23 nt, Artificial Sequence
  Description of Artificial Sequence: Synthetic oligonucleotide
ucagaaacauccaaaugugugcc

SEQ ID NO: 213 - RNA, 23 nt, Artificial Sequence
  Description of Artificial Sequence: Synthetic oligonucleotide
uccgaaguuuugccaaagcauca

SEQ ID NO: 214 - RNA, 23 nt, Artificial Sequence
  Description of Artificial Sequence: Synthetic oligonucleotide
ucuugaaauuaaggcucucguuu

SEQ ID NO: 215 - RNA, 23 nt, Artificial Sequence
  Description of Artificial Sequence: Synthetic oligonucleotide
uaugaagaaggacuccugauuca

SEQ ID NO: 216 - DNA, 23 bp, Artificial Sequence
  Description of Artificial Sequence: Synthetic oligonucleotide
  Description of Combined DNA/RNA Molecule: Synthetic oligonucleotide
utcaaaaucugtgccaugauuuu

SEQ ID NO: 217 - RNA, 23 nt, Artificial Sequence
  Description of Artificial Sequence: Synthetic oligonucleotide
uacaaccuuccacuuucacuguc

SEQ ID NO: 218 - RNA, 23 nt, Artificial Sequence
  Description of Artificial Sequence: Synthetic oligonucleotide
ugacaaccuuccacuuucacugu

SEQ ID NO: 219 - RNA, 23 nt, Artificial Sequence
  Description of Artificial Sequence: Synthetic oligonucleotide
uggacaaccuuccacuuucacug

SEQ ID NO: 220 - RNA, 23 nt, Artificial Sequence
  Description of Artificial Sequence: Synthetic oligonucleotide
ugcaaucuggaauuuuucuagga

SEQ ID NO: 221 - RNA, 23 nt, Artificial Sequence
  Description of Artificial Sequence: Synthetic oligonucleotide
ucauauagucggaugauaauuuc

SEQ ID NO: 222 - RNA, 23 nt, Artificial Sequence
  Description of Artificial Sequence: Synthetic oligonucleotide
uaucccauuggaaaauaaggcau

SEQ ID NO: 223 - RNA, 23 nt, Artificial Sequence
  Description of Artificial Sequence: Synthetic oligonucleotide
uaccaaaaucccauuggaaaaua

SEQ ID NO: 224 - RNA, 23 nt, Artificial Sequence
  Description of Artificial Sequence: Synthetic oligonucleotide
ugaccaaaaucccauuggaaaau

SEQ ID NO: 225 - RNA, 23 nt, Artificial Sequence
  Description of Artificial Sequence: Synthetic oligonucleotide
ucauguaaggugaaaucucaagu

SEQ ID NO: 226 - RNA, 23 nt, Artificial Sequence
  Description of Artificial Sequence: Synthetic oligonucleotide
uccaauacauucuguuugggcga

SEQ ID NO: 227 - RNA, 23 nt, Artificial Sequence
  Description of Artificial Sequence: Synthetic oligonucleotide
ucuaccagacaauaagcuucagg

SEQ ID NO: 228 - RNA, 23 nt, Artificial Sequence
  Description of Artificial Sequence: Synthetic oligonucleotide
uccuaccagacaauaagcuucag

SEQ ID NO: 229 - RNA, 23 nt, Artificial Sequence
  Description of Artificial Sequence: Synthetic oligonucleotide
uauccuaccagacaauaagcuuc

SEQ ID NO: 230 - RNA, 23 nt, Artificial Sequence
  Description of Artificial Sequence: Synthetic oligonucleotide
ucagauccuaccagacaauaagc

SEQ ID NO: 231 - RNA, 23 nt, Artificial Sequence
  Description of Artificial Sequence: Synthetic oligonucleotide
ucaagaaggaacuguaauuuuua

SEQ ID NO: 232 - RNA, 23 nt, Artificial Sequence
  Description of Artificial Sequence: Synthetic oligonucleotide
uagaauacagccuuuucuacaag

SEQ ID NO: 233 - DNA, 23 bp, Artificial Sequence
  Description of Artificial Sequence: Synthetic oligonucleotide
  Description of Combined DNA/RNA Molecule: Synthetic oligonucleotide
ucaacutggcccaaaagaauaca

SEQ ID NO: 234 - DNA, 23 bp, Artificial Sequence
  Description of Artificial Sequence: Synthetic oligonucleotide
  Description of Combined DNA/RNA Molecule: Synthetic oligonucleotide
utccacaacuuggcccaaaagaa

SEQ ID NO: 235 - DNA, 23 bp, Artificial Sequence
  Description of Artificial Sequence: Synthetic oligonucleotide
  Description of Combined DNA/RNA Molecule: Synthetic oligonucleotide
uaucaatguggtccacaacuugg

SEQ ID NO: 236 - DNA, 23 bp, Artificial Sequence
  Description of Artificial Sequence: Synthetic oligonucleotide
  Description of Combined DNA/RNA Molecule: Synthetic oligonucleotide
ugagaatcaaugugguccacaac

SEQ ID NO: 237 - RNA, 23 nt, Artificial Sequence
  Description of Artificial Sequence: Synthetic oligonucleotide
ucaacccaggaaaccauucuucc

SEQ ID NO: 238 - DNA, 23 bp, Artificial Sequence
  Description of Artificial Sequence: Synthetic oligonucleotide
  Description of Combined DNA/RNA Molecule: Synthetic oligonucleotide
utauaatgcccauuucuucaaca

SEQ ID NO: 239 - DNA, 23 bp, Artificial Sequence
  Description of Artificial Sequence: Synthetic oligonucleotide
  Description of Combined DNA/RNA Molecule: Synthetic oligonucleotide
utuacuaagagaucuccuuccuc

SEQ ID NO: 240 - DNA, 23 bp, Artificial Sequence
  Description of Artificial Sequence: Synthetic oligonucleotide
  Description of Combined DNA/RNA Molecule: Synthetic oligonucleotide
ucuggatuuactaagagaucucc

SEQ ID NO: 241 - DNA, 23 bp, Artificial Sequence
  Description of Artificial Sequence: Synthetic oligonucleotide
  Description of Combined DNA/RNA Molecule: Synthetic oligonucleotide
uagccutgguugaucuggauuua

SEQ ID NO: 242 - DNA, 23 bp, Artificial Sequence
  Description of Artificial Sequence: Synthetic oligonucleotide
  Description of Combined DNA/RNA Molecule: Synthetic oligonucleotide
ugauautggaatggugagccuug

SEQ ID NO: 243 - DNA, 23 bp, Artificial Sequence
  Description of Artificial Sequence: Synthetic oligonucleotide
  Description of Combined DNA/RNA Molecule: Synthetic oligonucleotide
uagatatuggaauggugagccuu

SEQ ID NO: 244 - RNA, 23 nt, Artificial Sequence
  Description of Artificial Sequence: Synthetic oligonucleotide
ugagauauuggaauggugagccu

SEQ ID NO: 245 - DNA, 23 bp, Artificial Sequence
  Description of Artificial Sequence: Synthetic oligonucleotide
  Description of Combined DNA/RNA Molecule: Synthetic oligonucleotide
ucaatctgagatauuggaauggu

SEQ ID NO: 246 - DNA, 23 bp, Artificial Sequence
  Description of Artificial Sequence: Synthetic oligonucleotide
  Description of Combined DNA/RNA Molecule: Synthetic oligonucleotide
uggcaatcugagauauuggaaug

SEQ ID NO: 247 - DNA, 23 bp, Artificial Sequence
  Description of Artificial Sequence: Synthetic oligonucleotide
  Description of Combined DNA/RNA Molecule: Synthetic oligonucleotide
uauaauauuuctaggcaggucag

SEQ ID NO: 248 - DNA, 23 bp, Artificial Sequence
  Description of Artificial Sequence: Synthetic oligonucleotide
  Description of Combined DNA/RNA Molecule: Synthetic oligonucleotide
uaacauaauautucuaggcaggu

SEQ ID NO: 249 - RNA, 23 nt, Artificial Sequence
  Description of Artificial Sequence: Synthetic oligonucleotide
ucaucaccuaggagaaacucugg

SEQ ID NO: 250 - DNA, 23 bp, Artificial Sequence
  Description of Artificial Sequence: Synthetic oligonucleotide
  Description of Combined DNA/RNA Molecule: Synthetic oligonucleotide
uccatcaccuaggagaaacucug

SEQ ID NO: 251 - RNA, 23 nt, Artificial Sequence
  Description of Artificial Sequence: Synthetic oligonucleotide
ucugauccaaaacugccaucacc

SEQ ID NO: 252 - DNA, 23 bp, Artificial Sequence
  Description of Artificial Sequence: Synthetic oligonucleotide
  Description of Combined DNA/RNA Molecule: Synthetic oligonucleotide
ucuaactccaucaccaacauccg

SEQ ID NO: 253 - DNA, 23 bp, Artificial Sequence
  Description of Artificial Sequence: Synthetic oligonucleotide
  Description of Combined DNA/RNA Molecule: Synthetic oligonucleotide
ugcuaacuccatcaccaacaucc

SEQ ID NO: 254 - RNA, 23 nt, Artificial Sequence
  Description of Artificial Sequence: Synthetic oligonucleotide
uauccaaggaacccuuggaggcu

SEQ ID NO: 255 - DNA, 23 bp, Artificial Sequence
  Description of Artificial Sequence: Synthetic oligonucleotide
  Description of Combined DNA/RNA Molecule: Synthetic oligonucleotide
ucugtaggguucuagugaggcug

SEQ ID NO: 256 - DNA, 23 bp, Artificial Sequence
  Description of Artificial Sequence: Synthetic oligonucleotide
  Description of Combined DNA/RNA Molecule: Synthetic oligonucleotide
uguatataaucauggcugagugg

SEQ ID NO: 257 - RNA, 23 nt, Artificial Sequence
  Description of Artificial Sequence: Synthetic oligonucleotide
ugguauauaaucauggcugagug

SEQ ID NO: 258 - DNA, 23 bp, Artificial Sequence
  Description of Artificial Sequence: Synthetic oligonucleotide
  Description of Combined DNA/RNA Molecule: Synthetic oligonucleotide
ucggtatauaatcauggcugagu

SEQ ID NO: 259 - DNA, 23 bp, Artificial Sequence
  Description of Artificial Sequence: Synthetic oligonucleotide
  Description of Combined DNA/RNA Molecule: Synthetic oligonucleotide
ucucggtauauaaucauggcuga

SEQ ID NO: 260 - RNA, 23 nt, Artificial Sequence
  Description of Artificial Sequence: Synthetic oligonucleotide
ugugaaaagcagcacauuguggg

SEQ ID NO: 261 - DNA, 23 bp, Artificial Sequence
  Description of Artificial Sequence: Synthetic oligonucleotide
  Description of Combined DNA/RNA Molecule: Synthetic oligonucleotide
uagcautgggatacagugugaaa

SEQ ID NO: 262 - DNA, 23 bp, Artificial Sequence
  Description of Artificial Sequence: Synthetic oligonucleotide
  Description of Combined DNA/RNA Molecule: Synthetic oligonucleotide
ucagcaaucuutgcaaugauggc

SEQ ID NO: 263 - DNA, 23 bp, Artificial Sequence
  Description of Artificial Sequence: Synthetic oligonucleotide
  Description of Combined DNA/RNA Molecule: Synthetic oligonucleotide
uccgtagucagcaaucuuugcaa

SEQ ID NO: 264 - RNA, 23 nt, Artificial Sequence
  Description of Artificial Sequence: Synthetic oligonucleotide
ugccguagucagcaaucuuugca

SEQ ID NO: 265 - DNA, 23 bp, Artificial Sequence
  Description of Artificial Sequence: Synthetic oligonucleotide
  Description of Combined DNA/RNA Molecule: Synthetic oligonucleotide
utgccgtagucagcaaucuuugc

SEQ ID NO: 266 - RNA, 23 nt, Artificial Sequence
  Description of Artificial Sequence: Synthetic oligonucleotide
uaugccguagucagcaaucuuug

SEQ ID NO: 267 - DNA, 23 bp, Artificial Sequence
  Description of Artificial Sequence: Synthetic oligonucleotide
  Description of Combined DNA/RNA Molecule: Synthetic oligonucleotide
uccatucuacagcaguacugagc

SEQ ID NO: 268 - RNA, 23 nt, Artificial Sequence
  Description of Artificial Sequence: Synthetic oligonucleotide
ugucaaaaugucauagaguagua

SEQ ID NO: 269 - RNA, 23 nt, Artificial Sequence
  Description of Artificial Sequence: Synthetic oligonucleotide
ucuacuauucuaccuccaguugu

SEQ ID NO: 270 - RNA, 23 nt, Artificial Sequence
  Description of Artificial Sequence: Synthetic oligonucleotide
ucaaccauauucuuuaacuggau

SEQ ID NO: 271 - RNA, 23 nt, Artificial Sequence
  Description of Artificial Sequence: Synthetic oligonucleotide
uagacuaauucagcugaauucaa

SEQ ID NO: 272 - RNA, 23 nt, Artificial Sequence
  Description of Artificial Sequence: Synthetic oligonucleotide
ucagacagacuaauucagcugaa

SEQ ID NO: 273 - RNA, 23 nt, Artificial Sequence
  Description of Artificial Sequence: Synthetic oligonucleotide
ucucgucagacagacuaauucag

SEQ ID NO: 274 - RNA, 23 nt, Artificial Sequence
  Description of Artificial Sequence: Synthetic oligonucleotide
ucaacaauuacguuuuuagguaa

SEQ ID NO: 275 - RNA, 23 nt, Artificial Sequence
  Description of Artificial Sequence: Synthetic oligonucleotide
uaagaaaugagagcuguccucug

SEQ ID NO: 276 - RNA, 23 nt, Artificial Sequence
  Description of Artificial Sequence: Synthetic oligonucleotide
uaccaaggcuaagcacaauauuc

SEQ ID NO: 277 - RNA, 23 nt, Artificial Sequence
  Description of Artificial Sequence: Synthetic oligonucleotide
uaggaagaugcaccaaggcuaag

SEQ ID NO: 278 - RNA, 23 nt, Artificial Sequence
  Description of Artificial Sequence: Synthetic oligonucleotide
uacaggaagaugcaccaaggcua

SEQ ID NO: 279 - DNA, 23 bp, Artificial Sequence
  Description of Artificial Sequence: Synthetic oligonucleotide
  Description of Combined DNA/RNA Molecule: Synthetic oligonucleotide
ugagtaccagacugugucccaga

SEQ ID NO: 280 - RNA, 23 nt, Artificial Sequence
  Description of Artificial Sequence: Synthetic oligonucleotide
ucaggagaguaccagacuguguc

SEQ ID NO: 281 - DNA, 23 bp, Artificial Sequence
  Description of Artificial Sequence: Synthetic oligonucleotide
  Description of Combined DNA/RNA Molecule: Synthetic oligonucleotide
ugguautgaugaccaggagagua

SEQ ID NO: 282 - DNA, 23 bp, Artificial Sequence
  Description of Artificial Sequence: Synthetic oligonucleotide
  Description of Combined DNA/RNA Molecule: Synthetic oligonucleotide
ucggtatugaugaccaggagagu

SEQ ID NO: 283 - DNA, 23 bp, Artificial Sequence
  Description of Artificial Sequence: Synthetic oligonucleotide
  Description of Combined DNA/RNA Molecule: Synthetic oligonucleotide
utcgguauugatgaccaggagag

SEQ ID NO: 284 - RNA, 23 nt, Artificial Sequence
  Description of Artificial Sequence: Synthetic oligonucleotide
ucuucgguauugaugaccaggag

SEQ ID NO: 285 - DNA, 23 bp, Artificial Sequence
  Description of Artificial Sequence: Synthetic oligonucleotide
  Description of Combined DNA/RNA Molecule: Synthetic oligonucleotide
ucaucutcgguauugaugaccag

SEQ ID NO: 286 - DNA, 23 bp, Artificial Sequence
  Description of Artificial Sequence: Synthetic oligonucleotide
  Description of Combined DNA/RNA Molecule: Synthetic oligonucleotide
uccatctucggtauugaugacca

SEQ ID NO: 287 - RNA, 23 nt, Artificial Sequence
  Description of Artificial Sequence: Synthetic oligonucleotide
ucccaucuucgguauugaugacc

SEQ ID NO: 288 - DNA, 23 bp, Artificial Sequence
  Description of Artificial Sequence: Synthetic oligonucleotide
  Description of Combined DNA/RNA Molecule: Synthetic oligonucleotide
ucuututcccatcuucgguauug

SEQ ID NO: 289 - DNA, 23 bp, Artificial Sequence
  Description of Artificial Sequence: Synthetic oligonucleotide
  Description of Combined DNA/RNA Molecule: Synthetic oligonucleotide
uggaautgcaatacaaacaagug

SEQ ID NO: 290 - DNA, 23 bp, Artificial Sequence
  Description of Artificial Sequence: Synthetic oligonucleotide
  Description of Combined DNA/RNA Molecule: Synthetic oligonucleotide
ugacautuccuauauuuaguauc

SEQ ID NO: 291 - DNA, 23 bp, Artificial Sequence
  Description of Artificial Sequence: Synthetic oligonucleotide
  Description of Combined DNA/RNA Molecule: Synthetic oligonucleotide
uaucaatggagtacugacauuuc

SEQ ID NO: 292 - DNA, 23 bp, Artificial Sequence
  Description of Artificial Sequence: Synthetic oligonucleotide
  Description of Combined DNA/RNA Molecule: Synthetic oligonucleotide
uacatcaauggaguacugacauu

SEQ ID NO: 293 - DNA, 23 bp, Artificial Sequence
  Description of Artificial Sequence: Synthetic oligonucleotide
  Description of Combined DNA/RNA Molecule: Synthetic oligonucleotide
ucucaaacacatcaauggaguac

SEQ ID NO: 294 - RNA, 23 nt, Artificial Sequence
  Description of Artificial Sequence: Synthetic oligonucleotide
uacucaaacacaucaauggagua

SEQ ID NO: 295 - DNA, 23 bp, Artificial Sequence
  Description of Artificial Sequence: Synthetic oligonucleotide
  Description of Combined DNA/RNA Molecule: Synthetic oligonucleotide
uaaucutugugccacauccuccc

SEQ ID NO: 296 - DNA, 23 bp, Artificial Sequence
  Description of Artificial Sequence: Synthetic oligonucleotide
  Description of Combined DNA/RNA Molecule: Synthetic oligonucleotide
uaucautagaaaaggagaaaauc

SEQ ID NO: 297 - DNA, 23 bp, Artificial Sequence
  Description of Artificial Sequence: Synthetic oligonucleotide
  Description of Combined DNA/RNA Molecule: Synthetic oligonucleotide
ucugaatggugaaaucauuagaa

SEQ ID NO: 298 - DNA, 23 bp, Artificial Sequence
  Description of Artificial Sequence: Synthetic oligonucleotide
  Description of Combined DNA/RNA Molecule: Synthetic oligonucleotide
ugagtutcugaauggugaaauca

SEQ ID NO: 299 - DNA, 23 bp, Artificial Sequence
  Description of Artificial Sequence: Synthetic oligonucleotide
  Description of Combined DNA/RNA Molecule: Synthetic oligonucleotide
ucucaatgagutucugaauggug

SEQ ID NO: 300 - DNA, 23 bp, Artificial Sequence
  Description of Artificial Sequence: Synthetic oligonucleotide
  Description of Combined DNA/RNA Molecule: Synthetic oligonucleotide
uacacutccacaacagggcuauu

SEQ ID NO: 301 - DNA, 23 bp, Artificial Sequence
  Description of Artificial Sequence: Synthetic oligonucleotide
  Description of Combined DNA/RNA Molecule: Synthetic oligonucleotide
ugaataagacatuuuguguuuug

SEQ ID NO: 302 - DNA, 23 bp, Artificial Sequence
  Description of Artificial Sequence: Synthetic oligonucleotide
  Description of Combined DNA/RNA Molecule: Synthetic oligonucleotide
utauccaaagagcaguguucuuc

SEQ ID NO: 303 - DNA, 23 bp, Artificial Sequence
  Description of Artificial Sequence: Synthetic oligonucleotide
  Description of Combined DNA/RNA Molecule: Synthetic oligonucleotide
ucagtuccuauccaaagagcagu

SEQ ID NO: 304 - DNA, 23 bp, Artificial Sequence
  Description of Artificial Sequence: Synthetic oligonucleotide
  Description of Combined DNA/RNA Molecule: Synthetic oligonucleotide
uccagutccuatccaaagagcag

SEQ ID NO: 305 - DNA, 23 bp, Artificial Sequence
  Description of Artificial Sequence: Synthetic oligonucleotide
  Description of Combined DNA/RNA Molecule: Synthetic oligonucleotide
utaaaatauggccuccuccaguu

SEQ ID NO: 306 - RNA, 23 nt, Artificial Sequence
  Description of Artificial Sequence: Synthetic oligonucleotide
ugacgaguugaaagauccaggag

SEQ ID NO: 307 - RNA, 23 nt, Artificial Sequence
  Description of Artificial Sequence: Synthetic oligonucleotide
ucgacgaguugaaagauccagga

SEQ ID NO: 308 - DNA, 23 bp, Artificial Sequence
  Description of Artificial Sequence: Synthetic oligonucleotide
  Description of Combined DNA/RNA Molecule: Synthetic oligonucleotide
utcgacgaguugaaagauccagg

SEQ ID NO: 309 - DNA, 23 bp, Artificial Sequence
  Description of Artificial Sequence: Synthetic oligonucleotide
  Description of Combined DNA/RNA Molecule: Synthetic oligonucleotide
ucaucatgacucugaccgaauua

SEQ ID NO: 310 - DNA, 23 bp, Artificial Sequence
  Description of Artificial Sequence: Synthetic oligonucleotide
  Description of Combined DNA/RNA Molecule: Synthetic oligonucleotide
ucaataccagcaugacauuuuua

SEQ ID NO: 311 - RNA, 23 nt, Artificial Sequence
  Description of Artificial Sequence: Synthetic oligonucleotide
ugcccaauaccagcaugacauuu

SEQ ID NO: 312 - RNA, 23 nt, Artificial Sequence
  Description of Artificial Sequence: Synthetic oligonucleotide
uagcccaauaccagcaugacauu

SEQ ID NO: 313 - DNA, 23 bp, Artificial Sequence
  Description of Artificial Sequence: Synthetic oligonucleotide
  Description of Combined DNA/RNA Molecule: Synthetic oligonucleotide
uagcaagauugtaucucuuucug

SEQ ID NO: 314 - DNA, 23 bp, Artificial Sequence
  Description of Artificial Sequence: Synthetic oligonucleotide
  Description of Combined DNA/RNA Molecule: Synthetic oligonucleotide
ugcacutcaugtggaagauugau

SEQ ID NO: 315 - DNA, 23 bp, Artificial Sequence
  Description of Artificial Sequence: Synthetic oligonucleotide
  Description of Combined DNA/RNA Molecule: Synthetic oligonucleotide
utaaautuugcacuucaugugga

SEQ ID NO: 316 - DNA, 23 bp, Artificial Sequence
  Description of Artificial Sequence: Synthetic oligonucleotide
  Description of Combined DNA/RNA Molecule: Synthetic oligonucleotide
ucuaaatuuugcacuucaugugg

SEQ ID NO: 317 - DNA, 23 bp, Artificial Sequence
  Description of Artificial Sequence: Synthetic oligonucleotide
  Description of Combined DNA/RNA Molecule: Synthetic oligonucleotide
utcuaaauuuugcacuucaugug

SEQ ID NO: 318 - DNA, 23 bp, Artificial Sequence
  Description of Artificial Sequence: Synthetic oligonucleotide
  Description of Combined DNA/RNA Molecule: Synthetic oligonucleotide
ucagcuaauuctuuucucacuuc

SEQ ID NO: 319 - DNA, 23 bp, Artificial Sequence
  Description of Artificial Sequence: Synthetic oligonucleotide
  Description of Combined DNA/RNA Molecule: Synthetic oligonucleotide
utauccaaagacaauuccuauuu

SEQ ID NO: 320 - RNA, 23 nt, Artificial Sequence
  Description of Artificial Sequence: Synthetic oligonucleotide
uccuauccaaagacaauuccuau

SEQ ID NO: 321 - DNA, 23 bp, Artificial Sequence
  Description of Artificial Sequence: Synthetic oligonucleotide
  Description of Combined DNA/RNA Molecule: Synthetic oligonucleotide
uggaaacuguctuaauauuuuca

SEQ ID NO: 322 - RNA, 23 nt, Artificial Sequence
  Description of Artificial Sequence: Synthetic oligonucleotide
ugggaaacugucuuaauauuuuc

SEQ ID NO: 323 - RNA, 21 nt, Artificial Sequence
  Description of Artificial Sequence: Synthetic oligonucleotide
agaagcauauacauucuccua

SEQ ID NO: 324 - RNA, 21 nt, Artificial Sequence
  Description of Artificial Sequence: Synthetic oligonucleotide
gcauauacauucuccugaaga

SEQ ID NO: 325 - RNA, 21 nt, Artificial Sequence
  Description of Artificial Sequence: Synthetic oligonucleotide
ugauauucacaaacuggucca

SEQ ID NO: 326 - RNA, 21 nt, Artificial Sequence
  Description of Artificial Sequence: Synthetic oligonucleotide
ucacaaacugguccuagcaga

SEQ ID NO: 327 - RNA, 21 nt, Artificial Sequence
  Description of Artificial Sequence: Synthetic oligonucleotide
ucacacacugcagauguauca

SEQ ID NO: 328 - RNA, 21 nt, Artificial Sequence
  Description of Artificial Sequence: Synthetic oligonucleotide
ugucuggguuuaagucuuaua

SEQ ID NO: 329 - RNA, 21 nt, Artificial Sequence
  Description of Artificial Sequence: Synthetic oligonucleotide
ggguuuaagucuuauaggaua

SEQ ID NO: 330 - RNA, 21 nt, Artificial Sequence
  Description of Artificial Sequence: Synthetic oligonucleotide
guuuccagcuuauaccgauua

SEQ ID NO: 331 - RNA, 21 nt, Artificial Sequence
  Description of Artificial Sequence: Synthetic oligonucleotide
uucuaaaccucuguugcaaga

SEQ ID NO: 332 - RNA, 21 nt, Artificial Sequence
  Description of Artificial Sequence: Synthetic oligonucleotide
aaccucuguugcaaguguuua

SEQ ID NO: 333 - RNA, 21 nt, Artificial Sequence
  Description of Artificial Sequence: Synthetic oligonucleotide
accucuguugcaaguguuuua

SEQ ID NO: 334 - RNA, 21 nt, Artificial Sequence
  Description of Artificial Sequence: Synthetic oligonucleotide
ucucgugaacaagauguacga

SEQ ID NO: 335 - RNA, 21 nt, Artificial Sequence
  Description of Artificial Sequence: Synthetic oligonucleotide
ggccaacaauagcauuugcca

SEQ ID NO: 336 - RNA, 21 nt, Artificial Sequence
  Description of Artificial Sequence: Synthetic oligonucleotide
aggaaaaguugaaccuucuua

SEQ ID NO: 337 - RNA, 21 nt, Artificial Sequence
  Description of Artificial Sequence: Synthetic oligonucleotide
aaaguugaaccuucuuggcua

SEQ ID NO: 338 - RNA, 21 nt, Artificial Sequence
  Description of Artificial Sequence: Synthetic oligonucleotide
cacuagcaagaauggugauca

SEQ ID NO: 339 - RNA, 21 nt, Artificial Sequence
  Description of Artificial Sequence: Synthetic oligonucleotide
uuuauuccugacucuucuaua

SEQ ID NO: 340 - RNA, 21 nt, Artificial Sequence
  Description of Artificial Sequence: Synthetic oligonucleotide
aggagaauuuuaccgagauga

SEQ ID NO: 341 - RNA, 21 nt, Artificial Sequence
  Description of Artificial Sequence: Synthetic oligonucleotide
uuuuaccgagaugccguauua

SEQ ID NO: 342 - RNA, 21 nt, Artificial Sequence
  Description of Artificial Sequence: Synthetic oligonucleotide
cagcauuucuucucuggcuua

SEQ ID NO: 343 - RNA, 21 nt, Artificial Sequence
  Description of Artificial Sequence: Synthetic oligonucleotide
cagaaugcacucacgagcuua

SEQ ID NO: 344 - RNA, 21 nt, Artificial Sequence
  Description of Artificial Sequence: Synthetic oligonucleotide
ugcacucacgagcuuuccaca

SEQ ID NO: 345 - RNA, 21 nt, Artificial Sequence
  Description of Artificial Sequence: Synthetic oligonucleotide
agcuuuccacaacagcuauga

SEQ ID NO: 346 - RNA, 21 nt, Artificial Sequence
  Description of Artificial Sequence: Synthetic oligonucleotide
cucucgaaaugacauuggaca

SEQ ID NO: 347 - RNA, 21 nt, Artificial Sequence
  Description of Artificial Sequence: Synthetic oligonucleotide
ucucgaaaugacauuggacca

SEQ ID NO: 348 - RNA, 21 nt, Artificial Sequence
  Description of Artificial Sequence: Synthetic oligonucleotide
ccucagugguuuuagauccua

SEQ ID NO: 349 - RNA, 21 nt, Artificial Sequence
  Description of Artificial Sequence: Synthetic oligonucleotide
guccaacucugaaacaguuua

SEQ ID NO: 350 - RNA, 21 nt, Artificial Sequence
  Description of Artificial Sequence: Synthetic oligonucleotide
gaaacaguuuaaccugucaua

SEQ ID NO: 351 - RNA, 21 nt, Artificial Sequence
  Description of Artificial Sequence: Synthetic oligonucleotide
aguuuaaccugucauauaaca

SEQ ID NO: 352 - RNA, 21 nt, Artificial Sequence
  Description of Artificial Sequence: Synthetic oligonucleotide
gaacuuucuugaggcuuguca

SEQ ID NO: 353 - RNA, 21 nt, Artificial Sequence
  Description of Artificial Sequence: Synthetic oligonucleotide
aauuuucuugcugcuaugcca

SEQ ID NO: 354 - RNA, 21 nt, Artificial Sequence
  Description of Artificial Sequence: Synthetic oligonucleotide
cugcuaugccuuucuugccua

SEQ ID NO: 355 - RNA, 21 nt, Artificial Sequence
  Description of Artificial Sequence: Synthetic oligonucleotide
uuaaaucuuccacacuugcga

SEQ ID NO: 356 - RNA, 21 nt, Artificial Sequence
  Description of Artificial Sequence: Synthetic oligonucleotide
aaucuuccacacuugcgguca

SEQ ID NO: 357 - RNA, 21 nt, Artificial Sequence
  Description of Artificial Sequence: Synthetic oligonucleotide
ucuuccacacuugcggucuua

SEQ ID NO: 358 - RNA, 21 nt, Artificial Sequence
  Description of Artificial Sequence: Synthetic oligonucleotide
cuuccacacuugcggucuuua

SEQ ID NO: 359 - RNA, 21 nt, Artificial Sequence
  Description of Artificial Sequence: Synthetic oligonucleotide
auaugagcagcaaugauauua

SEQ ID NO: 360 - RNA, 21 nt, Artificial Sequence
  Description of Artificial Sequence: Synthetic oligonucleotide
gaacuuaagggaacucuuaua

SEQ ID NO: 361 - RNA, 21 nt, Artificial Sequence
  Description of Artificial Sequence: Synthetic oligonucleotide
aacucuuauuuagccauaaua

SEQ ID NO: 362 - RNA, 21 nt, Artificial Sequence
  Description of Artificial Sequence: Synthetic oligonucleotide
aucagcaucuuggacuugaga

SEQ ID NO: 363 - RNA, 21 nt, Artificial Sequence
  Description of Artificial Sequence: Synthetic oligonucleotide
ucagcaucuuggacuugagua

SEQ ID NO: 364 - RNA, 21 nt, Artificial Sequence
  Description of Artificial Sequence: Synthetic oligonucleotide
aaaaucugacaucucuggaua

SEQ ID NO: 365 - RNA, 21 nt, Artificial Sequence
  Description of Artificial Sequence: Synthetic oligonucleotide
cucuggaugucaguuacaaca

SEQ ID NO: 366 - RNA, 21 nt, Artificial Sequence
  Description of Artificial Sequence: Synthetic oligonucleotide
uggaacuaagauccuuuccca

SEQ ID NO: 367 - RNA, 21 nt, Artificial Sequence
  Description of Artificial Sequence: Synthetic oligonucleotide
agcgagcauuguaccuugcua

SEQ ID NO: 368 - RNA, 21 nt, Artificial Sequence
  Description of Artificial Sequence: Synthetic oligonucleotide
uguaccuugcugucuaugaca

SEQ ID NO: 369 - RNA, 21 nt, Artificial Sequence
  Description of Artificial Sequence: Synthetic oligonucleotide
aauauaaaggcucgcgcuuca

SEQ ID NO: 370 - RNA, 21 nt, Artificial Sequence
  Description of Artificial Sequence: Synthetic oligonucleotide
uauaaaggcucgcgcuucuua

SEQ ID NO: 371 - RNA, 21 nt, Artificial Sequence
  Description of Artificial Sequence: Synthetic oligonucleotide
auaaaggcucgcgcuucuuca

SEQ ID NO: 372 - RNA, 21 nt, Artificial Sequence
  Description of Artificial Sequence: Synthetic oligonucleotide
acuccugaauaagcgagggua

SEQ ID NO: 373 - RNA, 21 nt, Artificial Sequence
  Description of Artificial Sequence: Synthetic oligonucleotide
ccugaauaagcgaggguucca

SEQ ID NO: 374 - RNA, 21 nt, Artificial Sequence
  Description of Artificial Sequence: Synthetic oligonucleotide
uccagacugcuauguagaaca

SEQ ID NO: 375 - RNA, 21 nt, Artificial Sequence
  Description of Artificial Sequence: Synthetic oligonucleotide
aaugagcuuccucacgcagua

SEQ ID NO: 376 - RNA, 21 nt, Artificial Sequence
  Description of Artificial Sequence: Synthetic oligonucleotide
gcuuccucacgcaguucacua

SEQ ID NO: 377 - RNA, 21 nt, Artificial Sequence
  Description of Artificial Sequence: Synthetic oligonucleotide
uuguggaacccaaguggcuua

SEQ ID NO: 378 - RNA, 21 nt, Artificial Sequence
  Description of Artificial Sequence: Synthetic oligonucleotide
cagugaaaguggaagguugua

SEQ ID NO: 379 - RNA, 21 nt, Artificial Sequence
  Description of Artificial Sequence: Synthetic oligonucleotide
agugaaaguggaagguuguca

SEQ ID NO: 380 - RNA, 21 nt, Artificial Sequence
  Description of Artificial Sequence: Synthetic oligonucleotide
gugaaaguggaagguugucca

SEQ ID NO: 381 - RNA, 21 nt, Artificial Sequence
  Description of Artificial Sequence: Synthetic oligonucleotide
uccaaagaacuacaugucaca

SEQ ID NO: 382 - RNA, 21 nt, Artificial Sequence
  Description of Artificial Sequence: Synthetic oligonucleotide
cuagaaaaauuccagauugca

SEQ ID NO: 383 - RNA, 21 nt, Artificial Sequence
  Description of Artificial Sequence: Synthetic oligonucleotide
gaauauuugcugguuccaaga

SEQ ID NO: 384 - RNA, 21 nt, Artificial Sequence
  Description of Artificial Sequence: Synthetic oligonucleotide
cucugaaauuaucauccgaca

SEQ ID NO: 385 - RNA, 21 nt, Artificial Sequence
  Description of Artificial Sequence: Synthetic oligonucleotide
gccuuauuuuccaaugggaua

SEQ ID NO: 386 - RNA, 21 nt, Artificial Sequence
  Description of Artificial Sequence: Synthetic oligonucleotide
gagauuucaccuuacaugcua

SEQ ID NO: 387 - RNA, 21 nt, Artificial Sequence
  Description of Artificial Sequence: Synthetic oligonucleotide
aaacagaauguauuggcgaca

SEQ ID NO: 388 - RNA, 21 nt, Artificial Sequence
  Description of Artificial Sequence: Synthetic oligonucleotide
uuacuuaaauuggucuccuga

SEQ ID NO: 389 - RNA, 21 nt, Artificial Sequence
  Description of Artificial Sequence: Synthetic oligonucleotide
cuuaaauuggucuccugaaga

SEQ ID NO: 390 - RNA, 21 nt, Artificial Sequence
  Description of Artificial Sequence: Synthetic oligonucleotide
ccugaagcuuauugucuggua

SEQ ID NO: 391 - RNA, 21 nt, Artificial Sequence
  Description of Artificial Sequence: Synthetic oligonucleotide
ugaagcuuauugucugguaga

SEQ ID NO: 392 - RNA, 21 nt, Artificial Sequence
  Description of Artificial Sequence: Synthetic oligonucleotide
gaagcuuauugucugguagga

SEQ ID NO: 393 - RNA, 21 nt, Artificial Sequence
  Description of Artificial Sequence: Synthetic oligonucleotide
agcuuauugucugguaggaua

SEQ ID NO: 394 - RNA, 21 nt, Artificial Sequence
  Description of Artificial Sequence: Synthetic oligonucleotide
uuauugucugguaggaucuga

SEQ ID NO: 395 - RNA, 21 nt, Artificial Sequence
  Description of Artificial Sequence: Synthetic oligonucleotide
cuuuugggccaaguuguggaa

SEQ ID NO: 396 - RNA, 21 nt, Artificial Sequence
  Description of Artificial Sequence: Synthetic oligonucleotide
uguggaccacauugauucuca

SEQ ID NO: 397 - RNA, 21 nt, Artificial Sequence
  Description of Artificial Sequence: Synthetic oligonucleotide
cacauugauucucucauggaa

SEQ ID NO: 398 - RNA, 21 nt, Artificial Sequence
  Description of Artificial Sequence: Synthetic oligonucleotide
ggguugcuggagauugauaua

SEQ ID NO: 399 - RNA, 21 nt, Artificial Sequence
  Description of Artificial Sequence: Synthetic oligonucleotide
gguugcuggagauugauauua

SEQ ID NO: 400 - RNA, 21 nt, Artificial Sequence
  Description of Artificial Sequence: Synthetic oligonucleotide
ugaaggagaaacucuguugaa

SEQ ID NO: 401 - RNA, 21 nt, Artificial Sequence
  Description of Artificial Sequence: Synthetic oligonucleotide
uugaagaaaugggcauuauaa

SEQ ID NO: 402 - RNA, 21 nt, Artificial Sequence
  Description of Artificial Sequence: Synthetic oligonucleotide
aaucuuacuugaugacuugaa

SEQ ID NO: 403 - RNA, 21 nt, Artificial Sequence
  Description of Artificial Sequence: Synthetic oligonucleotide
gcagaggaaggagaucucuua

SEQ ID NO: 404 - RNA, 21 nt, Artificial Sequence
  Description of Artificial Sequence: Synthetic oligonucleotide
gaaggagaucucuuaguaaaa

SEQ ID NO: 405 - RNA, 21 nt, Artificial Sequence
  Description of Artificial Sequence: Synthetic oligonucleotide
aggagaucucuuaguaaauca

SEQ ID NO: 406 - RNA, 21 nt, Artificial Sequence
  Description of Artificial Sequence: Synthetic oligonucleotide
ggagaucucuuaguaaaucca

SEQ ID NO: 407 - RNA, 21 nt, Artificial Sequence
  Description of Artificial Sequence: Synthetic oligonucleotide
agaucucuuaguaaauccaga

SEQ ID NO: 408 - RNA, 21 nt, Artificial Sequence
  Description of Artificial Sequence: Synthetic oligonucleotide
aguaaauccagaucaaccaaa

SEQ ID NO: 409 - RNA, 21 nt, Artificial Sequence
  Description of Artificial Sequence: Synthetic oligonucleotide
aauccagaucaaccaaggcua

SEQ ID NO: 410 - RNA, 21 nt, Artificial Sequence
  Description of Artificial Sequence: Synthetic oligonucleotide
auccagaucaaccaaggcuca

SEQ ID NO: 411 - RNA, 21 nt, Artificial Sequence
  Description of Artificial Sequence: Synthetic oligonucleotide
ccaaggcucaccauuccaaua

SEQ ID NO: 412 - RNA, 21 nt, Artificial Sequence
  Description of Artificial Sequence: Synthetic oligonucleotide
aggcucaccauuccaauauca

SEQ ID NO: 413 - RNA, 21 nt, Artificial Sequence
  Description of Artificial Sequence: Synthetic oligonucleotide
cauuccaauaucucagauuga

SEQ ID NO: 414 - RNA, 21 nt, Artificial Sequence
  Description of Artificial Sequence: Synthetic oligonucleotide
auuccaauaucucagauugca

SEQ ID NO: 415 - RNA, 21 nt, Artificial Sequence
  Description of Artificial Sequence: Synthetic oligonucleotide
uuccaauaucucagauugcca

SEQ ID NO: 416 - RNA, 21 nt, Artificial Sequence
  Description of Artificial Sequence: Synthetic oligonucleotide
ugaccugccuagaaauauuaa

SEQ ID NO: 417 - RNA, 21 nt, Artificial Sequence
  Description of Artificial Sequence: Synthetic oligonucleotide
guuggaauuugaacaagcuca

SEQ ID NO: 418 - RNA, 21 nt, Artificial Sequence
  Description of Artificial Sequence: Synthetic oligonucleotide
auuugaacaagcuccagagua

SEQ ID NO: 419 - RNA, 21 nt, Artificial Sequence
  Description of Artificial Sequence: Synthetic oligonucleotide
agcuccagaguuucuccuaga

SEQ ID NO: 420 - RNA, 21 nt, Artificial Sequence
  Description of Artificial Sequence: Synthetic oligonucleotide
gcuccagaguuucuccuagga

SEQ ID NO: 421 - RNA, 21 nt, Artificial Sequence
  Description of Artificial Sequence: Synthetic oligonucleotide
ccagaguuucuccuaggugaa

SEQ ID NO: 422 - RNA, 21 nt, Artificial Sequence
  Description of Artificial Sequence: Synthetic oligonucleotide
cagaguuucuccuaggugaua

SEQ ID NO: 423 - RNA, 21 nt, Artificial Sequence
  Description of Artificial Sequence: Synthetic oligonucleotide
agaguuucuccuaggugauga

SEQ ID NO: 424 - RNA, 21 nt, Artificial Sequence
  Description of Artificial Sequence: Synthetic oligonucleotide
gaguuucuccuaggugaugga

SEQ ID NO: 425 - RNA, 21 nt, Artificial Sequence
  Description of Artificial Sequence: Synthetic oligonucleotide
ugauggcaguuuuggaucaga

SEQ ID NO: 426 - RNA, 21 nt, Artificial Sequence
  Description of Artificial Sequence: Synthetic oligonucleotide
gauggcaguuuuggaucagua

SEQ ID NO: 427 - RNA, 21 nt, Artificial Sequence
  Description of Artificial Sequence: Synthetic oligonucleotide
gauguuggugauggaguuaga

SEQ ID NO: 428 - RNA, 21 nt, Artificial Sequence
  Description of Artificial Sequence: Synthetic oligonucleotide
auguuggugauggaguuagca

SEQ ID NO: 429 - RNA, 21 nt, Artificial Sequence
  Description of Artificial Sequence: Synthetic oligonucleotide
uguuggugauggaguuagcca

SEQ ID NO: 430 - RNA, 21 nt, Artificial Sequence
  Description of Artificial Sequence: Synthetic oligonucleotide
uuagccuccaaggguuccuua

SEQ ID NO: 431 - RNA, 21 nt, Artificial Sequence
  Description of Artificial Sequence: Synthetic oligonucleotide
ccuccaaggguuccuuggaua

SEQ ID NO: 432 - RNA, 21 nt, Artificial Sequence
  Description of Artificial Sequence: Synthetic oligonucleotide
gccucacuagaacccuacaga

SEQ ID NO: 433 - RNA, 21 nt, Artificial Sequence
  Description of Artificial Sequence: Synthetic oligonucleotide
ccucacuagaacccuacagca

SEQ ID NO: 434 - RNA, 21 nt, Artificial Sequence
  Description of Artificial Sequence: Synthetic oligonucleotide
cugaugguuugagauaccuca

SEQ ID NO: 435 - RNA, 21 nt, Artificial Sequence
  Description of Artificial Sequence: Synthetic oligonucleotide
acucagccaugauuauauaca

SEQ ID NO: 436 - RNA, 21 nt, Artificial Sequence
  Description of Artificial Sequence: Synthetic oligonucleotide
cucagccaugauuauauacca

SEQ ID NO: 437 - RNA, 21 nt, Artificial Sequence
  Description of Artificial Sequence: Synthetic oligonucleotide
cagccaugauuauauaccgaa

SEQ ID NO: 438 - RNA, 21 nt, Artificial Sequence
  Description of Artificial Sequence: Synthetic oligonucleotide
caaugugcugcuuuucacaca

SEQ ID NO: 439 - RNA, 21 nt, Artificial Sequence
  Description of Artificial Sequence: Synthetic oligonucleotide
gcugcuuuucacacuguauca

SEQ ID NO: 440 - RNA, 21 nt, Artificial Sequence
  Description of Artificial Sequence: Synthetic oligonucleotide
cugcuuuucacacuguaucca

SEQ ID NO: 441 - RNA, 21 nt, Artificial Sequence
  Description of Artificial Sequence: Synthetic oligonucleotide
uucacacuguaucccaaugca

SEQ ID NO: 442 - RNA, 21 nt, Artificial Sequence
  Description of Artificial Sequence: Synthetic oligonucleotide
acacuguaucccaaugcugca

SEQ ID NO: 443 - RNA, 21 nt, Artificial Sequence
  Description of Artificial Sequence: Synthetic oligonucleotide
ugcaaagauugcugacuacga

SEQ ID NO: 444 - RNA, 21 nt, Artificial Sequence
  Description of Artificial Sequence: Synthetic oligonucleotide
gcaaagauugcugacuacgga

SEQ ID NO: 445 - RNA, 21 nt, Artificial Sequence
  Description of Artificial Sequence: Synthetic oligonucleotide
aaagauugcugacuacggcaa

SEQ ID NO: 446 - RNA, 21 nt, Artificial Sequence
  Description of Artificial Sequence: Synthetic oligonucleotide
aagauugcugacuacggcaua

SEQ ID NO: 447 - RNA, 21 nt, Artificial Sequence
  Description of Artificial Sequence: Synthetic oligonucleotide
auugcugacuacggcauugca

SEQ ID NO: 448 - RNA, 21 nt, Artificial Sequence
  Description of Artificial Sequence: Synthetic oligonucleotide
ugcugacuacggcauugcuca

SEQ ID NO: 449 - RNA, 21 nt, Artificial Sequence
  Description of Artificial Sequence: Synthetic oligonucleotide
gcucaguacugcuguagaaua

SEQ ID NO: 450 - RNA, 21 nt, Artificial Sequence
  Description of Artificial Sequence: Synthetic oligonucleotide
cucaguacugcuguagaauga

SEQ ID NO: 451 - RNA, 21 nt, Artificial Sequence
  Description of Artificial Sequence: Synthetic oligonucleotide
ucaguacugcuguagaaugga

SEQ ID NO: 452 - RNA, 21 nt, Artificial Sequence
  Description of Artificial Sequence: Synthetic oligonucleotide
gagguagaauaguagagggua

SEQ ID NO: 453 - RNA, 21 nt, Artificial Sequence
  Description of Artificial Sequence: Synthetic oligonucleotide
guagaggguuugaaguuucca

SEQ ID NO: 454 - RNA, 21 nt, Artificial Sequence
  Description of Artificial Sequence: Synthetic oligonucleotide
uuugacauuuugaauucagca

SEQ ID NO: 455 - RNA, 21 nt, Artificial Sequence
  Description of Artificial Sequence: Synthetic oligonucleotide
cagcugaauuagucugucuga

SEQ ID NO: 456 - RNA, 21 nt, Artificial Sequence
  Description of Artificial Sequence: Synthetic oligonucleotide
gcugaauuagucugucugaca

SEQ ID NO: 457 - RNA, 21 nt, Artificial Sequence
  Description of Artificial Sequence: Synthetic oligonucleotide
cugaauuagucugucugacga

SEQ ID NO: 458 - RNA, 21 nt, Artificial Sequence
  Description of Artificial Sequence: Synthetic oligonucleotide
gaauuagucugucugacgaga

SEQ ID NO: 459 - RNA, 21 nt, Artificial Sequence
  Description of Artificial Sequence: Synthetic oligonucleotide
uaguagaauauugugcuuaga

SEQ ID NO: 460 - RNA, 21 nt, Artificial Sequence
  Description of Artificial Sequence: Synthetic oligonucleotide
aguagaauauugugcuuagca

SEQ ID NO: 461 - RNA, 21 nt, Artificial Sequence
  Description of Artificial Sequence: Synthetic oligonucleotide
aauauugugcuuagccuugga

SEQ ID NO: 462 - RNA, 21 nt, Artificial Sequence
  Description of Artificial Sequence: Synthetic oligonucleotide
auauugugcuuagccuuggua

SEQ ID NO: 463 - RNA, 21 nt, Artificial Sequence
  Description of Artificial Sequence: Synthetic oligonucleotide
gcuuagccuuggugcaucuua

SEQ ID NO: 464 - RNA, 21 nt, Artificial Sequence
  Description of Artificial Sequence: Synthetic oligonucleotide
uagccuuggugcaucuuccua

SEQ ID NO: 465 - RNA, 21 nt, Artificial Sequence
  Description of Artificial Sequence: Synthetic oligonucleotide
gccuuggugcaucuuccugua

SEQ ID NO: 466 - RNA, 21 nt, Artificial Sequence
  Description of Artificial Sequence: Synthetic oligonucleotide
ccuuggugcaucuuccuguua

SEQ ID NO: 467 - RNA, 21 nt, Artificial Sequence
  Description of Artificial Sequence: Synthetic oligonucleotide
ugggacacagucugguacuca

SEQ ID NO: 468 - RNA, 21 nt, Artificial Sequence
  Description of Artificial Sequence: Synthetic oligonucleotide
gggacacagucugguacucua

SEQ ID NO: 469 - RNA, 21 nt, Artificial Sequence
  Description of Artificial Sequence: Synthetic oligonucleotide
cacagucugguacucuccuga

SEQ ID NO: 470 - RNA, 21 nt, Artificial Sequence
  Description of Artificial Sequence: Synthetic oligonucleotide
cagucugguacucuccuggua

SEQ ID NO: 471 - RNA, 21 nt, Artificial Sequence
  Description of Artificial Sequence: Synthetic oligonucleotide
agucugguacucuccugguca

SEQ ID NO: 472 - RNA, 21 nt, Artificial Sequence
  Description of Artificial Sequence: Synthetic oligonucleotide
cucuccuggucaucaauacca

SEQ ID NO: 473 - RNA, 21 nt, Artificial Sequence
  Description of Artificial Sequence: Synthetic oligonucleotide
cuccuggucaucaauaccgaa

SEQ ID NO: 474 - RNA, 21 nt, Artificial Sequence
  Description of Artificial Sequence: Synthetic oligonucleotide
uccuggucaucaauaccgaaa

SEQ ID NO: 475 - RNA, 21 nt, Artificial Sequence
  Description of Artificial Sequence: Synthetic oligonucleotide
ccuggucaucaauaccgaaga

SEQ ID NO: 476 - RNA, 21 nt, Artificial Sequence
  Description of Artificial Sequence: Synthetic oligonucleotide
cuggucaucaauaccgaagaa

SEQ ID NO: 477 - RNA, 21 nt, Artificial Sequence
  Description of Artificial Sequence: Synthetic oligonucleotide
ggucaucaauaccgaagauga

SEQ ID NO: 478 - RNA, 21 nt, Artificial Sequence
  Description of Artificial Sequence: Synthetic oligonucleotide
gucaucaauaccgaagaugga

SEQ ID NO: 479 - RNA, 21 nt, Artificial Sequence
  Description of Artificial Sequence: Synthetic oligonucleotide
ucaucaauaccgaagauggga

SEQ ID NO: 480 - RNA, 21 nt, Artificial Sequence
  Description of Artificial Sequence: Synthetic oligonucleotide
caucaauaccgaagaugggaa

SEQ ID NO: 481 - RNA, 21 nt, Artificial Sequence
  Description of Artificial Sequence: Synthetic oligonucleotide
aucaauaccgaagaugggaaa

SEQ ID NO: 482 - RNA, 21 nt, Artificial Sequence
  Description of Artificial Sequence: Synthetic oligonucleotide
auaccgaagaugggaaaaaga

SEQ ID NO: 483 - RNA, 21 nt, Artificial Sequence
  Description of Artificial Sequence: Synthetic oligonucleotide
ugggaaaaagagacauaccca

SEQ ID NO: 484 - RNA, 21 nt, Artificial Sequence
  Description of Artificial Sequence: Synthetic oligonucleotide
gggaaaaagagacauacccua

SEQ ID NO: 485 - RNA, 21 nt, Artificial Sequence
  Description of Artificial Sequence: Synthetic oligonucleotide
aaagagacauacccuagaaaa

SEQ ID NO: 486 - RNA, 21 nt, Artificial Sequence
  Description of Artificial Sequence: Synthetic oligonucleotide
cuuguuuguauugcaauucca

SEQ ID NO: 487 - RNA, 21 nt, Artificial Sequence
  Description of Artificial Sequence: Synthetic oligonucleotide
uuuucuuuugguuggaaccga

SEQ ID NO: 488 - RNA, 21 nt, Artificial Sequence
  Description of Artificial Sequence: Synthetic oligonucleotide
uuucuuuugguuggaaccgca

SEQ ID NO: 489 - RNA, 21 nt, Artificial Sequence
  Description of Artificial Sequence: Synthetic oligonucleotide
uucuuuugguuggaaccgcua

SEQ ID NO: 490 - RNA, 21 nt, Artificial Sequence
  Description of Artificial Sequence: Synthetic oligonucleotide
cuuuugguuggaaccgcugaa

SEQ ID NO: 491 - RNA, 21 nt, Artificial Sequence
  Description of Artificial Sequence: Synthetic oligonucleotide
cugcuccuuugaagauacuaa

SEQ ID NO: 492 - RNA, 21 nt, Artificial Sequence
  Description of Artificial Sequence: Synthetic oligonucleotide
uacuaaauauaggaaauguca

SEQ ID NO: 493 - RNA, 21 nt, Artificial Sequence
  Description of Artificial Sequence: Synthetic oligonucleotide
auaggaaaugucaguacucca

SEQ ID NO: 494 - RNA, 21 nt, Artificial Sequence
  Description of Artificial Sequence: Synthetic oligonucleotide
caguacuccauugauguguua

SEQ ID NO: 495 - RNA, 21 nt, Artificial Sequence
  Description of Artificial Sequence: Synthetic oligonucleotide
gauguguuugagugaauccaa

SEQ ID NO: 496 - RNA, 21 nt, Artificial Sequence
  Description of Artificial Sequence: Synthetic oligonucleotide
auguguuugagugaauccaca

SEQ ID NO: 497 - RNA, 21 nt, Artificial Sequence
  Description of Artificial Sequence: Synthetic oligonucleotide
uuugagugaauccacaaauua

SEQ ID NO: 498 - RNA, 21 nt, Artificial Sequence
  Description of Artificial Sequence: Synthetic oligonucleotide
gaggauguggcacaaagauua

SEQ ID NO: 499 - RNA, 21 nt, Artificial Sequence
  Description of Artificial Sequence: Synthetic oligonucleotide
uuuucuccuuuucuaaugaua

SEQ ID NO: 500 - RNA, 21 nt, Artificial Sequence
  Description of Artificial Sequence: Synthetic oligonucleotide
ucuaaugauuucaccauucaa

SEQ ID NO: 501 - RNA, 21 nt, Artificial Sequence
  Description of Artificial Sequence: Synthetic oligonucleotide
uaaugauuucaccauucagaa

SEQ ID NO: 502 - RNA, 21 nt, Artificial Sequence
  Description of Artificial Sequence: Synthetic oligonucleotide
auuucaccauucagaaacuca

SEQ ID NO: 503 - RNA, 21 nt, Artificial Sequence
  Description of Artificial Sequence: Synthetic oligonucleotide
auucagaaacucauugagaca

SEQ ID NO: 504 - RNA, 21 nt, Artificial Sequence
  Description of Artificial Sequence: Synthetic oligonucleotide
gacaagaacaagccaacugua

SEQ ID NO: 505 - RNA, 21 nt, Artificial Sequence
  Description of Artificial Sequence: Synthetic oligonucleotide
aagaacaagccaacuguuuua

SEQ ID NO: 506 - RNA, 21 nt, Artificial Sequence
  Description of Artificial Sequence: Synthetic oligonucleotide
uagcccuguuguggaagugua

SEQ ID NO: 507 - RNA, 21 nt, Artificial Sequence
  Description of Artificial Sequence: Synthetic oligonucleotide
cuguuguggaagugugggaua

SEQ ID NO: 508 - RNA, 21 nt, Artificial Sequence
  Description of Artificial Sequence: Synthetic oligonucleotide
gugcacuuuuuaagggaggua

SEQ ID NO: 509 - RNA, 21 nt, Artificial Sequence
  Description of Artificial Sequence: Synthetic oligonucleotide
aaacacaaaaugucuuauuca

SEQ ID NO: 510 - RNA, 21 nt, Artificial Sequence
  Description of Artificial Sequence: Synthetic oligonucleotide
caaaaugucuuauucugggaa

SEQ ID NO: 511 - RNA, 21 nt, Artificial Sequence
  Description of Artificial Sequence: Synthetic oligonucleotide
agaacacugcucuuuggauaa

SEQ ID NO: 512 - RNA, 21 nt, Artificial Sequence
  Description of Artificial Sequence: Synthetic oligonucleotide
ugcucuuuggauaggaacuga

SEQ ID NO: 513 - RNA, 21 nt, Artificial Sequence
  Description of Artificial Sequence: Synthetic oligonucleotide
gcucuuuggauaggaacugga

SEQ ID NO: 514 - RNA, 21 nt, Artificial Sequence
  Description of Artificial Sequence: Synthetic oligonucleotide
ccuggaucuuucaacucguca

SEQ ID NO: 515 - RNA, 21 nt, Artificial Sequence
  Description of Artificial Sequence: Synthetic oligonucleotide
auucggucagagucaugauga

SEQ ID NO: 516 - RNA, 21 nt, Artificial Sequence
  Description of Artificial Sequence: Synthetic oligonucleotide
uaaaaaugucaugcugguaua

SEQ ID NO: 517 - RNA, 21 nt, Artificial Sequence
  Description of Artificial Sequence: Synthetic oligonucleotide
augucaugcugguauugggca

SEQ ID NO: 518 - RNA, 21 nt, Artificial Sequence
  Description of Artificial Sequence: Synthetic oligonucleotide
ugucaugcugguauugggcua

SEQ ID NO: 519 - RNA, 21 nt, Artificial Sequence
  Description of Artificial Sequence: Synthetic oligonucleotide
gaaagagauacaaucuugcua

SEQ ID NO: 520 - RNA, 21 nt, Artificial Sequence
  Description of Artificial Sequence: Synthetic oligonucleotide
aucaaucuuccacaugaagua

SEQ ID NO: 521 - RNA, 21 nt, Artificial Sequence
  Description of Artificial Sequence: Synthetic oligonucleotide
caaucuuccacaugaagugca

SEQ ID NO: 522 - RNA, 21 nt, Artificial Sequence
  Description of Artificial Sequence: Synthetic oligonucleotide
auaggaauugucuuuggauaa

SEQ ID NO: 523 - RNA, 21 nt, Artificial Sequence
  Description of Artificial Sequence: Synthetic oligonucleotide
uacuaaaauuuauaaggccga

SEQ ID NO: 524 - RNA, 21 nt, Artificial Sequence
  Description of Artificial Sequence: Synthetic oligonucleotide
cuaaaauuuauaaggccgaua

SEQ ID NO: 525 - RNA, 21 nt, Artificial Sequence
  Description of Artificial Sequence: Synthetic oligonucleotide
aaaauauuaagacaguuucca

SEQ ID NO: 526 - RNA, 23 nt, Artificial Sequence
  Description of Artificial Sequence: Synthetic oligonucleotide
uaggagaauguauaugcuucugc

SEQ ID NO: 527 - RNA, 23 nt, Artificial Sequence
  Description of Artificial Sequence: Synthetic oligonucleotide
ucuucaggagaauguauaugcuu

SEQ ID NO: 528 - RNA, 23 nt, Artificial Sequence
  Description of Artificial Sequence: Synthetic oligonucleotide
uggaccaguuugugaauaucauu

SEQ ID NO: 529 - RNA, 23 nt, Artificial Sequence
  Description of Artificial Sequence: Synthetic oligonucleotide
ucugcuaggaccaguuugugaau

SEQ ID NO: 530 - RNA, 23 nt, Artificial Sequence
  Description of Artificial Sequence: Synthetic oligonucleotide
ugauacaucugcagugugugaag

SEQ ID NO: 531 - RNA, 23 nt, Artificial Sequence
  Description of Artificial Sequence: Synthetic oligonucleotide
uauaagacuuaaacccagacacu

SEQ ID NO: 532 - RNA, 23 nt, Artificial Sequence
  Description of Artificial Sequence: Synthetic oligonucleotide
uauccuauaagacuuaaacccag

SEQ ID NO: 533 - RNA, 23 nt, Artificial Sequence
  Description of Artificial Sequence: Synthetic oligonucleotide
uaaucgguauaagcuggaaacca

SEQ ID NO: 534 - RNA, 23 nt, Artificial Sequence
  Description of Artificial Sequence: Synthetic oligonucleotide
ucuugcaacagagguuuagaaac

SEQ ID NO: 535 - RNA, 23 nt, Artificial Sequence
  Description of Artificial Sequence: Synthetic oligonucleotide
uaaacacuugcaacagagguuua

SEQ ID NO: 536 - RNA, 23 nt, Artificial Sequence
  Description of Artificial Sequence: Synthetic oligonucleotide
uaaaacacuugcaacagagguuu

SEQ ID NO: 537 - RNA, 23 nt, Artificial Sequence
  Description of Artificial Sequence: Synthetic oligonucleotide
ucguacaucuuguucacgagauc

SEQ ID NO: 538 - RNA, 23 nt, Artificial Sequence
  Description of Artificial Sequence: Synthetic oligonucleotide
uggcaaaugcuauuguuggccac

SEQ ID NO: 539 - RNA, 23 nt, Artificial Sequence
  Description of Artificial Sequence: Synthetic oligonucleotide
uaagaagguucaacuuuuccuau

SEQ ID NO: 540 - RNA, 23 nt, Artificial Sequence
  Description of Artificial Sequence: Synthetic oligonucleotide
uagccaagaagguucaacuuuuc

SEQ ID NO: 541 - RNA, 23 nt, Artificial Sequence
  Description of Artificial Sequence: Synthetic oligonucleotide
ugaucaccauucuugcuagugua

SEQ ID NO: 542 - RNA, 23 nt, Artificial Sequence
  Description of Artificial Sequence: Synthetic oligonucleotide
uauagaagagucaggaauaaagg

SEQ ID NO: 543 - RNA, 23 nt, Artificial Sequence
  Description of Artificial Sequence: Synthetic oligonucleotide
ucaucucgguaaaauucuccuac

SEQ ID NO: 544 - RNA, 23 nt, Artificial Sequence
  Description of Artificial Sequence: Synthetic oligonucleotide
uaauacggcaucucgguaaaauu

SEQ ID NO: 545 - RNA, 23 nt, Artificial Sequence
  Description of Artificial Sequence: Synthetic oligonucleotide
uaagccagagaagaaaugcuguc

SEQ ID NO: 546 - RNA, 23 nt, Artificial Sequence
  Description of Artificial Sequence: Synthetic oligonucleotide
uaagcucgugagugcauucuggu

SEQ ID NO: 547 - RNA, 23 nt, Artificial Sequence
  Description of Artificial Sequence: Synthetic oligonucleotide
uguggaaagcucgugagugcauu

SEQ ID NO: 548 - RNA, 23 nt, Artificial Sequence
  Description of Artificial Sequence: Synthetic oligonucleotide
ucauagcuguuguggaaagcucg

SEQ ID NO: 549 - RNA, 23 nt, Artificial Sequence
  Description of Artificial Sequence: Synthetic oligonucleotide
uguccaaugucauuucgagagac

SEQ ID NO: 550 - RNA, 23 nt, Artificial Sequence
  Description of Artificial Sequence: Synthetic oligonucleotide
ugguccaaugucauuucgagaga

SEQ ID NO: 551 - RNA, 23 nt, Artificial Sequence
  Description of Artificial Sequence: Synthetic oligonucleotide
uaggaucuaaaaccacugagggu

SEQ ID NO: 552 - RNA, 23 nt, Artificial Sequence
  Description of Artificial Sequence: Synthetic oligonucleotide
uaaacuguuucagaguuggacau

SEQ ID NO: 553 - RNA, 23 nt, Artificial Sequence
  Description of Artificial Sequence: Synthetic oligonucleotide
uaugacagguuaaacuguuucag

SEQ ID NO: 554 - RNA, 23 nt, Artificial Sequence
  Description of Artificial Sequence: Synthetic oligonucleotide
uguuauaugacagguuaaacugu

SEQ ID NO: 555 - RNA, 23 nt, Artificial Sequence
  Description of Artificial Sequence: Synthetic oligonucleotide
ugacaagccucaagaaaguucuc

SEQ ID NO: 556 - RNA, 23 nt, Artificial Sequence
  Description of Artificial Sequence: Synthetic oligonucleotide
uggcauagcagcaagaaaauuca

SEQ ID NO: 557 - RNA, 23 nt, Artificial Sequence
  Description of Artificial Sequence: Synthetic oligonucleotide
uaggcaagaaaggcauagcagca

SEQ ID NO: 558 - RNA, 23 nt, Artificial Sequence
  Description of Artificial Sequence: Synthetic oligonucleotide
ucgcaaguguggaagauuuaaaa

SEQ ID NO: 559 - RNA, 23 nt, Artificial Sequence
  Description of Artificial Sequence: Synthetic oligonucleotide
ugaccgcaaguguggaagauuua

SEQ ID NO: 560 - RNA, 23 nt, Artificial Sequence
  Description of Artificial Sequence: Synthetic oligonucleotide
uaagaccgcaaguguggaagauu

SEQ ID NO: 561 - RNA, 23 nt, Artificial Sequence
  Description of Artificial Sequence: Synthetic oligonucleotide
uaaagaccgcaaguguggaagau

SEQ ID NO: 562 - RNA, 23 nt, Artificial Sequence
  Description of Artificial Sequence: Synthetic oligonucleotide
uaauaucauugcugcucauaucu

SEQ ID NO: 563 - RNA, 23 nt, Artificial Sequence
  Description of Artificial Sequence: Synthetic oligonucleotide
uauaagaguucccuuaaguucaa

SEQ ID NO: 564 - RNA, 23 nt, Artificial Sequence
  Description of Artificial Sequence: Synthetic oligonucleotide
uauuauggcuaaauaagaguucc

SEQ ID NO: 565 - RNA, 23 nt, Artificial Sequence
  Description of Artificial Sequence: Synthetic oligonucleotide
ucucaaguccaagaugcugaucu

SEQ ID NO: 566 - RNA, 23 nt, Artificial Sequence
  Description of Artificial Sequence: Synthetic oligonucleotide
uacucaaguccaagaugcugauc

SEQ ID NO: 567 - RNA, 23 nt, Artificial Sequence
  Description of Artificial Sequence: Synthetic oligonucleotide
uauccagagaugucagauuuuca

SEQ ID NO: 568 - RNA, 23 nt, Artificial Sequence
  Description of Artificial Sequence: Synthetic oligonucleotide
uguuguaacugacauccagagau

SEQ ID NO: 569 - RNA, 23 nt, Artificial Sequence
  Description of Artificial Sequence: Synthetic oligonucleotide
ugggaaaggaucuuaguuccaag

SEQ ID NO: 570 - RNA, 23 nt, Artificial Sequence
  Description of Artificial Sequence: Synthetic oligonucleotide
uagcaagguacaaugcucgcugc

SEQ ID NO: 571 - RNA, 23 nt, Artificial Sequence
  Description of Artificial Sequence: Synthetic oligonucleotide
ugucauagacagcaagguacaau

SEQ ID NO: 572 - RNA, 23 nt, Artificial Sequence
  Description of Artificial Sequence: Synthetic oligonucleotide
ugaagcgcgagccuuuauauuga

SEQ ID NO: 573 - RNA, 23 nt, Artificial Sequence
  Description of Artificial Sequence: Synthetic oligonucleotide
uaagaagcgcgagccuuuauauu

SEQ ID NO: 574 - RNA, 23 nt, Artificial Sequence
  Description of Artificial Sequence: Synthetic oligonucleotide
ugaagaagcgcgagccuuuauau

SEQ ID NO: 575 - RNA, 23 nt, Artificial Sequence
  Description of Artificial Sequence: Synthetic oligonucleotide
uacccucgcuuauucaggaguuc

SEQ ID NO: 576 - RNA, 23 nt, Artificial Sequence
  Description of Artificial Sequence: Synthetic oligonucleotide
uggaacccucgcuuauucaggag

SEQ ID NO: 577 - RNA, 23 nt, Artificial Sequence
  Description of Artificial Sequence: Synthetic oligonucleotide
uguucuacauagcagucuggaau

SEQ ID NO: 578 - RNA, 23 nt, Artificial Sequence
  Description of Artificial Sequence: Synthetic oligonucleotide
uacugcgugaggaagcucauuuu

SEQ ID NO: 579 - RNA, 23 nt, Artificial Sequence
  Description of Artificial Sequence: Synthetic oligonucleotide
uagugaacugcgugaggaagcuc

SEQ ID NO: 580 - RNA, 23 nt, Artificial Sequence
  Description of Artificial Sequence: Synthetic oligonucleotide
uaagccacuuggguuccacaaag

SEQ ID NO: 581 - RNA, 23 nt, Artificial Sequence
  Description of Artificial Sequence: Synthetic oligonucleotide
uacaaccuuccacuuucacuguc

SEQ ID NO: 582 - RNA, 23 nt, Artificial Sequence
  Description of Artificial Sequence: Synthetic oligonucleotide
ugacaaccuuccacuuucacugu

SEQ ID NO: 583 - RNA, 23 nt, Artificial Sequence
  Description of Artificial Sequence: Synthetic oligonucleotide
uggacaaccuuccacuuucacug

SEQ ID NO: 584 - RNA, 23 nt, Artificial Sequence
  Description of Artificial Sequence: Synthetic oligonucleotide
ugugacauguaguucuuuggaaa

SEQ ID NO: 585 - RNA, 23 nt, Artificial Sequence
  Description of Artificial Sequence: Synthetic oligonucleotide
ugcaaucuggaauuuuucuagga

SEQ ID NO: 586 - RNA, 23 nt, Artificial Sequence
  Description of Artificial Sequence: Synthetic oligonucleotide
ucuuggaaccagcaaauauucuu

SEQ ID NO: 587 - RNA, 23 nt, Artificial Sequence
  Description of Artificial Sequence: Synthetic oligonucleotide
ugucggaugauaauuucagaguu

SEQ ID NO: 588 - RNA, 23 nt, Artificial Sequence
  Description of Artificial Sequence: Synthetic oligonucleotide
uaucccauuggaaaauaaggcau

SEQ ID NO: 589 - RNA, 23 nt, Artificial Sequence
  Description of Artificial Sequence: Synthetic oligonucleotide
uagcauguaaggugaaaucucaa

SEQ ID NO: 590 - RNA, 23 nt, Artificial Sequence
  Description of Artificial Sequence: Synthetic oligonucleotide
ugucgccaauacauucuguuugg

SEQ ID NO: 591 - RNA, 23 nt, Artificial Sequence
  Description of Artificial Sequence: Synthetic oligonucleotide
ucaggagaccaauuuaaguaaau

SEQ ID NO: 592 - RNA, 23 nt, Artificial Sequence
  Description of Artificial Sequence: Synthetic oligonucleotide
ucuucaggagaccaauuuaagua

SEQ ID NO: 593 - RNA, 23 nt, Artificial Sequence
  Description of Artificial Sequence: Synthetic oligonucleotide
uaccagacaauaagcuucaggag

SEQ ID NO: 594 - RNA, 23 nt, Artificial Sequence
  Description of Artificial Sequence: Synthetic oligonucleotide
ucuaccagacaauaagcuucagg

SEQ ID NO: 595 - RNA, 23 nt, Artificial Sequence
  Description of Artificial Sequence: Synthetic oligonucleotide
uccuaccagacaauaagcuucag

SEQ ID NO: 596 - RNA, 23 nt, Artificial Sequence
  Description of Artificial Sequence: Synthetic oligonucleotide
uauccuaccagacaauaagcuuc

SEQ ID NO: 597 - RNA, 23 nt, Artificial Sequence
  Description of Artificial Sequence: Synthetic oligonucleotide
ucagauccuaccagacaauaagc

SEQ ID NO: 598 - RNA, 23 nt, Artificial Sequence
  Description of Artificial Sequence: Synthetic oligonucleotide
uuccacaacuuggcccaaaagaa

SEQ ID NO: 599 - DNA, 23 bp, Artificial Sequence
  Description of Artificial Sequence: Synthetic oligonucleotide
  Description of Combined DNA/RNA Molecule: Synthetic oligonucleotide
ugagaatcaaugugguccacaac

SEQ ID NO: 600 - RNA, 23 nt, Artificial Sequence
  Description of Artificial Sequence: Synthetic oligonucleotide
uuccaugagagaaucaauguggu

SEQ ID NO: 601 - RNA, 23 nt, Artificial Sequence
  Description of Artificial Sequence: Synthetic oligonucleotide
uauaucaaucuccagcaacccag

SEQ ID NO: 602 - RNA, 23 nt, Artificial Sequence
  Description of Artificial Sequence: Synthetic oligonucleotide
uaauaucaaucuccagcaaccca

SEQ ID NO: 603 - RNA, 23 nt, Artificial Sequence
  Description of Artificial Sequence: Synthetic oligonucleotide
uucaacagaguuucuccuucacc

SEQ ID NO: 604 - DNA, 23 bp, Artificial Sequence
  Description of Artificial Sequence: Synthetic oligonucleotide
  Description of Combined DNA/RNA Molecule: Synthetic oligonucleotide
uuauaatgcccauuucuucaaca

SEQ ID NO: 605 - DNA, 23 bp, Artificial Sequence
  Description of Artificial Sequence: Synthetic oligonucleotide
  Description of Combined DNA/RNA Molecule: Synthetic oligonucleotide
uucaagtcaucaaguaagauuuu

SEQ ID NO: 606 - RNA, 23 nt, Artificial Sequence
  Description of Artificial Sequence: Synthetic oligonucleotide
uaagagaucuccuuccucugcuu

SEQ ID NO: 607 - DNA, 23 bp, Artificial Sequence
  Description of Artificial Sequence: Synthetic oligonucleotide
  Description of Combined DNA/RNA Molecule: Synthetic oligonucleotide
uuuuactaagagaucuccuuccu

SEQ ID NO: 608 - RNA, 23 nt, Artificial Sequence
  Description of Artificial Sequence: Synthetic oligonucleotide
ugauuuacuaagagaucuccuuc

SEQ ID NO: 609 - DNA, 23 bp, Artificial Sequence
  Description of Artificial Sequence: Synthetic oligonucleotide
  Description of Combined DNA/RNA Molecule: Synthetic oligonucleotide
uggauutacuaagagaucuccuu

SEQ ID NO: 610 - DNA, 23 bp, Artificial Sequence
  Description of Artificial Sequence: Synthetic oligonucleotide
  Description of Combined DNA/RNA Molecule: Synthetic oligonucleotide
ucuggatuuacuaagagaucucc

SEQ ID NO: 611 - DNA, 23 bp, Artificial Sequence
  Description of Artificial Sequence: Synthetic oligonucleotide
  Description of Combined DNA/RNA Molecule: Synthetic oligonucleotide
uuuggutgaucuggauuuacuaa

SEQ ID NO: 612 - DNA, 23 bp, Artificial Sequence
  Description of Artificial Sequence: Synthetic oligonucleotide
  Description of Combined DNA/RNA Molecule: Synthetic oligonucleotide
uagccutgguugaucuggauuua

SEQ ID NO: 613 - DNA, 23 bp, Artificial Sequence
  Description of Artificial Sequence: Synthetic oligonucleotide
  Description of Combined DNA/RNA Molecule: Synthetic oligonucleotide
ugagcctugguugaucuggauuu

SEQ ID NO: 614 - RNA, 23 nt, Artificial Sequence
  Description of Artificial Sequence: Synthetic oligonucleotide
uauuggaauggugagccuugguu

SEQ ID NO: 615 - DNA, 23 bp, Artificial Sequence
  Description of Artificial Sequence: Synthetic oligonucleotide
  Description of Combined DNA/RNA Molecule: Synthetic oligonucleotide
ugauautggaauggugagccuug

SEQ ID NO: 616 - DNA, 23 bp, Artificial Sequence
  Description of Artificial Sequence: Synthetic oligonucleotide
  Description of Combined DNA/RNA Molecule: Synthetic oligonucleotide
ucaauctgagauauuggaauggu

SEQ ID NO: 617 - RNA, 23 nt, Artificial Sequence
  Description of Artificial Sequence: Synthetic oligonucleotide
ugcaaucugagauauuggaaugg

SEQ ID NO: 618 - DNA, 23 bp, Artificial Sequence
  Description of Artificial Sequence: Synthetic oligonucleotide
  Description of Combined DNA/RNA Molecule: Synthetic oligonucleotide
uggcaatcugagauauuggaaug

SEQ ID NO: 619 - DNA, 23 bp, Artificial Sequence
  Description of Artificial Sequence: Synthetic oligonucleotide
  Description of Combined DNA/RNA Molecule: Synthetic oligonucleotide
uuaauatuucuaggcaggucagc

SEQ ID NO: 620 - DNA, 23 bp, Artificial Sequence
  Description of Artificial Sequence: Synthetic oligonucleotide
  Description of Combined DNA/RNA Molecule: Synthetic oligonucleotide
ugagcutguucaaauuccaacuc

SEQ ID NO: 621 - RNA, 23 nt, Artificial Sequence
  Description of Artificial Sequence: Synthetic oligonucleotide
uacucuggagcuuguucaaauuc

SEQ ID NO: 622 - RNA, 23 nt, Artificial Sequence
  Description of Artificial Sequence: Synthetic oligonucleotide
ucuaggagaaacucuggagcuug

SEQ ID NO: 623 - RNA, 23 nt, Artificial Sequence
  Description of Artificial Sequence: Synthetic oligonucleotide
uccuaggagaaacucuggagcuu

SEQ ID NO: 624 - DNA, 23 bp, Artificial Sequence
  Description of Artificial Sequence: Synthetic oligonucleotide
  Description of Combined DNA/RNA Molecule: Synthetic oligonucleotide
uucacctaggagaaacucuggag

SEQ ID NO: 625 - RNA, 23 nt, Artificial Sequence
  Description of Artificial Sequence: Synthetic oligonucleotide
uaucaccuaggagaaacucugga

SEQ ID NO: 626 - RNA, 23 nt, Artificial Sequence
  Description of Artificial Sequence: Synthetic oligonucleotide
ucaucaccuaggagaaacucugg

SEQ ID NO: 627 - RNA, 23 nt, Artificial Sequence
  Description of Artificial Sequence: Synthetic oligonucleotide
uccaucaccuaggagaaacucug

SEQ ID NO: 628 - RNA, 23 nt, Artificial Sequence
  Description of Artificial Sequence: Synthetic oligonucleotide
ucugauccaaaacugccaucacc

SEQ ID NO: 629 - DNA, 23 bp, Artificial Sequence
  Description of Artificial Sequence: Synthetic oligonucleotide
  Description of Combined DNA/RNA Molecule: Synthetic oligonucleotide
uacugatccaaaacugccaucac

SEQ ID NO: 630 - DNA, 23 bp, Artificial Sequence
  Description of Artificial Sequence: Synthetic oligonucleotide
  Description of Combined DNA/RNA Molecule: Synthetic oligonucleotide
ucuaactccaucaccaacauccg

SEQ ID NO: 631 - RNA, 23 nt, Artificial Sequence
  Description of Artificial Sequence: Synthetic oligonucleotide
ugcuaacuccaucaccaacaucc

SEQ ID NO: 632 - RNA, 23 nt, Artificial Sequence
  Description of Artificial Sequence: Synthetic oligonucleotide
uggcuaacuccaucaccaacauc

SEQ ID NO: 633 - RNA, 23 nt, Artificial Sequence
  Description of Artificial Sequence: Synthetic oligonucleotide
uaaggaacccuuggaggcuaacu

SEQ ID NO: 634 - RNA, 23 nt, Artificial Sequence
  Description of Artificial Sequence: Synthetic oligonucleotide
uauccaaggaacccuuggaggcu

SEQ ID NO: 635 - RNA, 23 nt, Artificial Sequence
  Description of Artificial Sequence: Synthetic oligonucleotide
ucuguaggguucuagugaggcug

SEQ ID NO: 636 - RNA, 23 nt, Artificial Sequence
  Description of Artificial Sequence: Synthetic oligonucleotide
ugcuguaggguucuagugaggcu

SEQ ID NO: 637 - RNA, 23 nt, Artificial Sequence
  Description of Artificial Sequence: Synthetic oligonucleotide
ugagguaucucaaaccaucagcu

SEQ ID NO: 638 - DNA, 23 bp, Artificial Sequence
  Description of Artificial Sequence: Synthetic oligonucleotide
  Description of Combined DNA/RNA Molecule: Synthetic oligonucleotide
uguauataaucauggcugagugg

SEQ ID NO: 639 - RNA, 23 nt, Artificial Sequence
  Description of Artificial Sequence: Synthetic oligonucleotide
ugguauauaaucauggcugagug

SEQ ID NO: 640 - RNA, 23 nt, Artificial Sequence
  Description of Artificial Sequence: Synthetic oligonucleotide
uucgguauauaaucauggcugag

SEQ ID NO: 641 - RNA, 23 nt, Artificial Sequence
  Description of Artificial Sequence: Synthetic oligonucleotide
ugugugaaaagcagcacauugug

SEQ ID NO: 642 - RNA, 23 nt, Artificial Sequence
  Description of Artificial Sequence: Synthetic oligonucleotide
ugauacagugugaaaagcagcac

SEQ ID NO: 643 - RNA, 23 nt, Artificial Sequence
  Description of Artificial Sequence: Synthetic oligonucleotide
uggauacagugugaaaagcagca

SEQ ID NO: 644 - RNA, 23 nt, Artificial Sequence
  Description of Artificial Sequence: Synthetic oligonucleotide
ugcauugggauacagugugaaaa

SEQ ID NO: 645 - RNA, 23 nt, Artificial Sequence
  Description of Artificial Sequence: Synthetic oligonucleotide
ugcagcauugggauacaguguga

SEQ ID NO: 646 - DNA, 23 bp, Artificial Sequence
  Description of Artificial Sequence: Synthetic oligonucleotide
  Description of Combined DNA/RNA Molecule: Synthetic oligonucleotide
ucguagtcagcaaucuuugcaau

SEQ ID NO: 647 - RNA, 23 nt, Artificial Sequence
  Description of Artificial Sequence: Synthetic oligonucleotide
uccguagucagcaaucuuugcaa

SEQ ID NO: 648 - DNA, 23 bp, Artificial Sequence
  Description of Artificial Sequence: Synthetic oligonucleotide
  Description of Combined DNA/RNA Molecule: Synthetic oligonucleotide
uugccgtagucagcaaucuuugc

SEQ ID NO: 649 - RNA, 23 nt, Artificial Sequence
  Description of Artificial Sequence: Synthetic oligonucleotide
uaugccguagucagcaaucuuug

SEQ ID NO: 650 - RNA, 23 nt, Artificial Sequence
  Description of Artificial Sequence: Synthetic oligonucleotide
ugcaaugccguagucagcaaucu

SEQ ID NO: 651 - RNA, 23 nt, Artificial Sequence
  Description of Artificial Sequence: Synthetic oligonucleotide
ugagcaaugccguagucagcaau

SEQ ID NO: 652 - RNA, 23 nt, Artificial Sequence
  Description of Artificial Sequence: Synthetic oligonucleotide
uauucuacagcaguacugagcaa

SEQ ID NO: 653 - DNA, 23 bp, Artificial Sequence
  Description of Artificial Sequence: Synthetic oligonucleotide
  Description of Combined DNA/RNA Molecule: Synthetic oligonucleotide
ucauuctacagcaguacugagca

SEQ ID NO: 654 - RNA, 23 nt, Artificial Sequence
  Description of Artificial Sequence: Synthetic oligonucleotide
uccauucuacagcaguacugagc

SEQ ID NO: 655 - RNA, 23 nt, Artificial Sequence
  Description of Artificial Sequence: Synthetic oligonucleotide
uacccucuacuauucuaccucca

SEQ ID NO: 656 - RNA, 23 nt, Artificial Sequence
  Description of Artificial Sequence: Synthetic oligonucleotide
uggaaacuucaaacccucuacua

SEQ ID NO: 657 - RNA, 23 nt, Artificial Sequence
  Description of Artificial Sequence: Synthetic oligonucleotide
ugcugaauucaaaaugucaaaga

SEQ ID NO: 658 - RNA, 23 nt, Artificial Sequence
  Description of Artificial Sequence: Synthetic oligonucleotide
ucagacagacuaauucagcugaa

SEQ ID NO: 659 - RNA, 23 nt, Artificial Sequence
  Description of Artificial Sequence: Synthetic oligonucleotide
ugucagacagacuaauucagcug

SEQ ID NO: 660 - RNA, 23 nt, Artificial Sequence
  Description of Artificial Sequence: Synthetic oligonucleotide
ucgucagacagacuaauucagcu

SEQ ID NO: 661 - RNA, 23 nt, Artificial Sequence
  Description of Artificial Sequence: Synthetic oligonucleotide
ucucgucagacagacuaauucag

SEQ ID NO: 662 - RNA, 23 nt, Artificial Sequence
  Description of Artificial Sequence: Synthetic oligonucleotide
ucuaagcacaauauucuacuauc

SEQ ID NO: 663 - RNA, 23 nt, Artificial Sequence
  Description of Artificial Sequence: Synthetic oligonucleotide
ugcuaagcacaauauucuacuau

SEQ ID NO: 664 - RNA, 23 nt, Artificial Sequence
  Description of Artificial Sequence: Synthetic oligonucleotide
uccaaggcuaagcacaauauucu

SEQ ID NO: 665 - RNA, 23 nt, Artificial Sequence
  Description of Artificial Sequence: Synthetic oligonucleotide
uaccaaggcuaagcacaauauuc

SEQ ID NO: 666 - RNA, 23 nt, Artificial Sequence
  Description of Artificial Sequence: Synthetic oligonucleotide
uaagaugcaccaaggcuaagcac

SEQ ID NO: 667 - RNA, 23 nt, Artificial Sequence
  Description of Artificial Sequence: Synthetic oligonucleotide
uaggaagaugcaccaaggcuaag

SEQ ID NO: 668 - RNA, 23 nt, Artificial Sequence
  Description of Artificial Sequence: Synthetic oligonucleotide
uacaggaagaugcaccaaggcua

SEQ ID NO: 669 - RNA, 23 nt, Artificial Sequence
  Description of Artificial Sequence: Synthetic oligonucleotide
uaacaggaagaugcaccaaggcu

SEQ ID NO: 670 - RNA, 23 nt, Artificial Sequence
  Description of Artificial Sequence: Synthetic oligonucleotide
ugaguaccagacugugucccaga

SEQ ID NO: 671 - RNA, 23 nt, Artificial Sequence
  Description of Artificial Sequence: Synthetic oligonucleotide
uagaguaccagacugugucccag

SEQ ID NO: 672 - RNA, 23 nt, Artificial Sequence
  Description of Artificial Sequence: Synthetic oligonucleotide
ucaggagaguaccagacuguguc

SEQ ID NO: 673 - RNA, 23 nt, Artificial Sequence
  Description of Artificial Sequence: Synthetic oligonucleotide
uaccaggagaguaccagacugug

SEQ ID NO: 674 - RNA, 23 nt, Artificial Sequence
  Description of Artificial Sequence: Synthetic oligonucleotide
ugaccaggagaguaccagacugu

SEQ ID NO: 675 - DNA, 23 bp, Artificial Sequence
  Description of Artificial Sequence: Synthetic oligonucleotide
  Description of Combined DNA/RNA Molecule: Synthetic oligonucleotide
ugguautgaugaccaggagagua

SEQ ID NO: 676 - RNA, 23 nt, Artificial Sequence
  Description of Artificial Sequence: Synthetic oligonucleotide
uucgguauugaugaccaggagag

SEQ ID NO: 677 - DNA, 23 bp, Artificial Sequence
  Description of Artificial Sequence: Synthetic oligonucleotide
  Description of Combined DNA/RNA Molecule: Synthetic oligonucleotide
uuucggtauugaugaccaggaga

SEQ ID NO: 678 - RNA, 23 nt, Artificial Sequence
  Description of Artificial Sequence: Synthetic oligonucleotide
ucuucgguauugaugaccaggag

SEQ ID NO: 679 - RNA, 23 nt, Artificial Sequence
  Description of Artificial Sequence: Synthetic oligonucleotide
uucuucgguauugaugaccagga

SEQ ID NO: 680 - DNA, 23 bp, Artificial Sequence
  Description of Artificial Sequence: Synthetic oligonucleotide
  Description of Combined DNA/RNA Molecule: Synthetic oligonucleotide
ucaucutcgguauugaugaccag

SEQ ID NO: 681 - DNA, 23 bp, Artificial Sequence
  Description of Artificial Sequence: Synthetic oligonucleotide
  Description of Combined DNA/RNA Molecule: Synthetic oligonucleotide
uccauctucgguauugaugacca

SEQ ID NO: 682 - RNA, 23 nt, Artificial Sequence
  Description of Artificial Sequence: Synthetic oligonucleotide
ucccaucuucgguauugaugacc

SEQ ID NO: 683 - DNA, 23 bp, Artificial Sequence
  Description of Artificial Sequence: Synthetic oligonucleotide
  Description of Combined DNA/RNA Molecule: Synthetic oligonucleotide
uucccatcuucgguauugaugac

SEQ ID NO: 684 - RNA, 23 nt, Artificial Sequence
  Description of Artificial Sequence: Synthetic oligonucleotide
uuucccaucuucgguauugauga

SEQ ID NO: 685 - DNA, 23 bp, Artificial Sequence
  Description of Artificial Sequence: Synthetic oligonucleotide
  Description of Combined DNA/RNA Molecule: Synthetic oligonucleotide
ucuuuutcccaucuucgguauug

SEQ ID NO: 686 - DNA, 23 bp, Artificial Sequence
  Description of Artificial Sequence: Synthetic oligonucleotide
  Description of Combined DNA/RNA Molecule: Synthetic oligonucleotide
uggguatgucucuuuuucccauc

SEQ ID NO: 687 - RNA, 23 nt, Artificial Sequence
  Description of Artificial Sequence: Synthetic oligonucleotide
uaggguaugucucuuuuucccau

SEQ ID NO: 688 - RNA, 23 nt, Artificial Sequence
  Description of Artificial Sequence: Synthetic oligonucleotide
uuuucuaggguaugucucuuuuu

SEQ ID NO: 689 - DNA, 23 bp, Artificial Sequence
  Description of Artificial Sequence: Synthetic oligonucleotide
  Description of Combined DNA/RNA Molecule: Synthetic oligonucleotide
uggaautgcaauacaaacaagug

SEQ ID NO: 690 - RNA, 23 nt, Artificial Sequence
  Description of Artificial Sequence: Synthetic oligonucleotide
ucgguuccaaccaaaagaaaauu

SEQ ID NO: 691 - DNA, 23 bp, Artificial Sequence
  Description of Artificial Sequence: Synthetic oligonucleotide
  Description of Combined DNA/RNA Molecule: Synthetic oligonucleotide
ugcggutccaaccaaaagaaaau

SEQ ID NO: 692 - DNA, 23 bp, Artificial Sequence
  Description of Artificial Sequence: Synthetic oligonucleotide
  Description of Combined DNA/RNA Molecule: Synthetic oligonucleotide
uagcggtuccaaccaaaagaaaa

SEQ ID NO: 693 - RNA, 23 nt, Artificial Sequence
  Description of Artificial Sequence: Synthetic oligonucleotide
uucagcgguuccaaccaaaagaa

SEQ ID NO: 694 - DNA, 23 bp, Artificial Sequence
  Description of Artificial Sequence: Synthetic oligonucleotide
  Description of Combined DNA/RNA Molecule: Synthetic oligonucleotide
uuaguatcuucaaaggagcagcu

SEQ ID NO: 695 - DNA, 23 bp, Artificial Sequence
  Description of Artificial Sequence: Synthetic oligonucleotide
  Description of Combined DNA/RNA Molecule: Synthetic oligonucleotide
ugacautuccuauauuuaguauc

SEQ ID NO: 696 - RNA, 23 nt, Artificial Sequence
  Description of Artificial Sequence: Synthetic oligonucleotide
uggaguacugacauuuccuauau

SEQ ID NO: 697 - RNA, 23 nt, Artificial Sequence
  Description of Artificial Sequence: Synthetic oligonucleotide
uaacacaucaauggaguacugac

SEQ ID NO: 698 - DNA, 23 bp, Artificial Sequence
  Description of Artificial Sequence: Synthetic oligonucleotide
  Description of Combined DNA/RNA Molecule: Synthetic oligonucleotide
uuggautcacucaaacacaucaa

SEQ ID NO: 699 - DNA, 23 bp, Artificial Sequence
  Description of Artificial Sequence: Synthetic oligonucleotide
  Description of Combined DNA/RNA Molecule: Synthetic oligonucleotide
uguggatucacucaaacacauca

SEQ ID NO: 700 - RNA, 23 nt, Artificial Sequence
  Description of Artificial Sequence: Synthetic oligonucleotide
uaauuuguggauucacucaaaca

SEQ ID NO: 701 - DNA, 23 bp, Artificial Sequence
  Description of Artificial Sequence: Synthetic oligonucleotide
  Description of Combined DNA/RNA Molecule: Synthetic oligonucleotide
uaaucutugugccacauccuccc

SEQ ID NO: 702 - DNA, 23 bp, Artificial Sequence
  Description of Artificial Sequence: Synthetic oligonucleotide
  Description of Combined DNA/RNA Molecule: Synthetic oligonucleotide
uaucautagaaaaggagaaaauc

SEQ ID NO: 703 - RNA, 23 nt, Artificial Sequence
  Description of Artificial Sequence: Synthetic oligonucleotide
uugaauggugaaaucauuagaaa

SEQ ID NO: 704 - RNA, 23 nt, Artificial Sequence
  Description of Artificial Sequence: Synthetic oligonucleotide
uucugaauggugaaaucauuaga

SEQ ID NO: 705 - DNA, 23 bp, Artificial Sequence
  Description of Artificial Sequence: Synthetic oligonucleotide
  Description of Combined DNA/RNA Molecule: Synthetic oligonucleotide
ugaguutcugaauggugaaauca

SEQ ID NO: 706 - RNA, 23 nt, Artificial Sequence
  Description of Artificial Sequence: Synthetic oligonucleotide
ugucucaaugaguuucugaaugg

SEQ ID NO: 707 - DNA, 23 bp, Artificial Sequence
  Description of Artificial Sequence: Synthetic oligonucleotide
  Description of Combined DNA/RNA Molecule: Synthetic oligonucleotide
uacagutggcuuguucuugucuc

SEQ ID NO: 708 - RNA, 23 nt, Artificial Sequence
  Description of Artificial Sequence: Synthetic oligonucleotide
uaaaacaguuggcuuguucuugu

SEQ ID NO: 709 - DNA, 23 bp, Artificial Sequence
  Description of Artificial Sequence: Synthetic oligonucleotide
  Description of Combined DNA/RNA Molecule: Synthetic oligonucleotide
uacacutccacaacagggcuauu

SEQ ID NO: 710 - RNA, 23 nt, Artificial Sequence
  Description of Artificial Sequence: Synthetic oligonucleotide
uaucccacacuuccacaacaggg

SEQ ID NO: 711 - RNA, 23 nt, Artificial Sequence
  Description of Artificial Sequence: Synthetic oligonucleotide
uaccucccuuaaaaagugcacgc

SEQ ID NO: 712 - RNA, 23 nt, Artificial Sequence
  Description of Artificial Sequence: Synthetic oligonucleotide
ugaauaagacauuuuguguuuug

SEQ ID NO: 713 - RNA, 23 nt, Artificial Sequence
  Description of Artificial Sequence: Synthetic oligonucleotide
uucccagaauaagacauuuugug

SEQ ID NO: 714 - RNA, 23 nt, Artificial Sequence
  Description of Artificial Sequence: Synthetic oligonucleotide
uuauccaaagagcaguguucuuc

SEQ ID NO: 715 - RNA, 23 nt, Artificial Sequence
  Description of Artificial Sequence: Synthetic oligonucleotide
ucaguuccuauccaaagagcagu

SEQ ID NO: 716 - DNA, 23 bp, Artificial Sequence
  Description of Artificial Sequence: Synthetic oligonucleotide
  Description of Combined DNA/RNA Molecule: Synthetic oligonucleotide
uccagutccuauccaaagagcag

SEQ ID NO: 717 - RNA, 23 nt, Artificial Sequence
  Description of Artificial Sequence: Synthetic oligonucleotide
ugacgaguugaaagauccaggag

SEQ ID NO: 718 - DNA, 23 bp, Artificial Sequence
  Description of Artificial Sequence: Synthetic oligonucleotide
  Description of Combined DNA/RNA Molecule: Synthetic oligonucleotide
ucaucatgacucugaccgaauua

SEQ ID NO: 719 - RNA, 23 nt, Artificial Sequence
  Description of Artificial Sequence: Synthetic oligonucleotide
uauaccagcaugacauuuuuaag

SEQ ID NO: 720 - RNA, 23 nt, Artificial Sequence
  Description of Artificial Sequence: Synthetic oligonucleotide
ugcccaauaccagcaugacauuu

SEQ ID NO: 721 - RNA, 23 nt, Artificial Sequence
  Description of Artificial Sequence: Synthetic oligonucleotide
uagcccaauaccagcaugacauu

SEQ ID NO: 722 - RNA, 23 nt, Artificial Sequence
  Description of Artificial Sequence: Synthetic oligonucleotide
uagcaagauuguaucucuuucug

SEQ ID NO: 723 - RNA, 23 nt, Artificial Sequence
  Description of Artificial Sequence: Synthetic oligonucleotide
uacuucauguggaagauugaugu

SEQ ID NO: 724 - DNA, 23 bp, Artificial Sequence
  Description of Artificial Sequence: Synthetic oligonucleotide
  Description of Combined DNA/RNA Molecule: Synthetic oligonucleotide
ugcacutcauguggaagauugau

SEQ ID NO: 725 - RNA, 23 nt, Artificial Sequence
  Description of Artificial Sequence: Synthetic oligonucleotide
uuauccaaagacaauuccuauuu

SEQ ID NO: 726 - DNA, 23 bp, Artificial Sequence
  Description of Artificial Sequence: Synthetic oligonucleotide
  Description of Combined DNA/RNA Molecule: Synthetic oligonucleotide
ucggcctuauaaauuuuaguaug

SEQ ID NO: 727 - RNA, 23 nt, Artificial Sequence
  Description of Artificial Sequence: Synthetic oligonucleotide
uaucggccuuauaaauuuuagua

SEQ ID NO: 728 - RNA, 23 nt, Artificial Sequence
  Description of Artificial Sequence: Synthetic oligonucleotide
uggaaacugucuuaauauuuuca

SEQ ID NO: 729 - RNA, 21 nt, Artificial Sequence
  Description of Artificial Sequence: Synthetic oligonucleotide
uuuauuccugacucuucuaua

SEQ ID NO: 730 - RNA, 21 nt, Artificial Sequence
  Description of Artificial Sequence: Synthetic oligonucleotide
uuuauuccugacucuucuaua

SEQ ID NO: 731 - RNA, 21 nt, Artificial Sequence
  Description of Artificial Sequence: Synthetic oligonucleotide
cuacucuaugacauuuugaca

SEQ ID NO: 732 - RNA, 21 nt, Artificial Sequence
  Description of Artificial Sequence: Synthetic oligonucleotide
cagcugaauuagucugucuga

SEQ ID NO: 733 - RNA, 21 nt, Artificial Sequence
  Description of Artificial Sequence: Synthetic oligonucleotide
cagcugaauuagucugucuga

SEQ ID NO: 734 - RNA, 21 nt, Artificial Sequence
  Description of Artificial Sequence: Synthetic oligonucleotide
aaacacaaaaugucuuauuca

SEQ ID NO: 735 - RNA, 21 nt, Artificial Sequence
  Description of Artificial Sequence: Synthetic oligonucleotide
aaacacaaaaugucuuauuca

SEQ ID NO: 736 - RNA, 21 nt, Artificial Sequence
  Description of Artificial Sequence: Synthetic oligonucleotide
guccaacucugaaacaguuua

SEQ ID NO: 737 - RNA, 21 nt, Artificial Sequence
  Description of Artificial Sequence: Synthetic oligonucleotide
uccaaagaacuacaugucaca

SEQ ID NO: 738 - RNA, 21 nt, Artificial Sequence
  Description of Artificial Sequence: Synthetic oligonucleotide
cauuccaauaucucagauuga

SEQ ID NO: 739 - RNA, 21 nt, Artificial Sequence
  Description of Artificial Sequence: Synthetic oligonucleotide
cauuccaauaucucagauuga

SEQ ID NO: 740 - RNA, 21 nt, Artificial Sequence
  Description of Artificial Sequence: Synthetic oligonucleotide
cugccuagaaauauuauguua

SEQ ID NO: 741 - RNA, 21 nt, Artificial Sequence
  Description of Artificial Sequence: Synthetic oligonucleotide
gcugcuuuucacacuguauca

SEQ ID NO: 742 - RNA, 21 nt, Artificial Sequence
  Description of Artificial Sequence: Synthetic oligonucleotide
cucuggaugucaguuacaaca

SEQ ID NO: 743 - RNA, 21 nt, Artificial Sequence
  Description of Artificial Sequence: Synthetic oligonucleotide
agcgagcauuguaccuugcua

SEQ ID NO: 744 - RNA, 21 nt, Artificial Sequence
  Description of Artificial Sequence: Synthetic oligonucleotide
cacauugauucucucauggaa

SEQ ID NO: 745 - RNA, 21 nt, Artificial Sequence
  Description of Artificial Sequence: Synthetic oligonucleotide
caguacuccauugauguguua

SEQ ID NO: 746 - RNA, 21 nt, Artificial Sequence
  Description of Artificial Sequence: Synthetic oligonucleotide
ucuaaugauuucaccauucaa

SEQ ID NO: 747 - RNA, 21 nt, Artificial Sequence
  Description of Artificial Sequence: Synthetic oligonucleotide
cuaaugauuucaccauucaga

SEQ ID NO: 748 - RNA, 21 nt, Artificial Sequence
  Description of Artificial Sequence: Synthetic oligonucleotide
ccauucagaaacucauugaga

SEQ ID NO: 749 - RNA, 21 nt, Artificial Sequence
  Description of Artificial Sequence: Synthetic oligonucleotide
ccuggaucuuucaacucguca

SEQ ID NO: 750 - RNA, 21 nt, Artificial Sequence
  Description of Artificial Sequence: Synthetic oligonucleotide
ccuggaucuuucaacucguca

SEQ ID NO: 751 - RNA, 21 nt, Artificial Sequence
  Description of Artificial Sequence: Synthetic oligonucleotide
aucaaucuuccacaugaagua

SEQ ID NO: 752 - RNA, 21 nt, Artificial Sequence
  Description of Artificial Sequence: Synthetic oligonucleotide
cucucgaaaugacauuggaca

SEQ ID NO: 753 - RNA, 21 nt, Artificial Sequence
  Description of Artificial Sequence: Synthetic oligonucleotide
cucucgaaaugacauuggaca

SEQ ID NO: 754 - RNA, 21 nt, Artificial Sequence
  Description of Artificial Sequence: Synthetic oligonucleotide
uccacacuugcggucuuuaga

SEQ ID NO: 755 - RNA, 21 nt, Artificial Sequence
  Description of Artificial Sequence: Synthetic oligonucleotide
uaagggaacucuuauuuagca

SEQ ID NO: 756 - RNA, 21 nt, Artificial Sequence
  Description of Artificial Sequence: Synthetic oligonucleotide
uagagaaacugcaucuuucua

SEQ ID NO: 757 - RNA, 21 nt, Artificial Sequence
  Description of Artificial Sequence: Synthetic oligonucleotide
aaaaucugacaucucuggaua

SEQ ID NO: 758 - RNA, 21 nt, Artificial Sequence
  Description of Artificial Sequence: Synthetic oligonucleotide
cuagaaaaauuccagauugca

SEQ ID NO: 759 - RNA, 21 nt, Artificial Sequence
  Description of Artificial Sequence: Synthetic oligonucleotide
cuagaaaaauuccagauugca

SEQ ID NO: 760 - RNA, 21 nt, Artificial Sequence
  Description of Artificial Sequence: Synthetic oligonucleotide
uugagauuucaccuuacauga

SEQ ID NO: 761 - RNA, 21 nt, Artificial Sequence
  Description of Artificial Sequence: Synthetic oligonucleotide
gaaggagaucucuuaguaaaa

SEQ ID NO: 762 - RNA, 21 nt, Artificial Sequence
  Description of Artificial Sequence: Synthetic oligonucleotide
aggagaucucuuaguaaauca

SEQ ID NO: 763 - RNA, 21 nt, Artificial Sequence
  Description of Artificial Sequence: Synthetic oligonucleotide
uuccaauaucucagauugcca

SEQ ID NO: 764 - RNA, 21 nt, Artificial Sequence
  Description of Artificial Sequence: Synthetic oligonucleotide
uuccaauaucucagauugcca

SEQ ID NO: 765 - RNA, 21 nt, Artificial Sequence
  Description of Artificial Sequence: Synthetic oligonucleotide
ccagaguuucuccuaggugaa

SEQ ID NO: 766 - RNA, 21 nt, Artificial Sequence
  Description of Artificial Sequence: Synthetic oligonucleotide
aaugucaguacuccauugaua

SEQ ID NO: 767 - RNA, 21 nt, Artificial Sequence
  Description of Artificial Sequence: Synthetic oligonucleotide
uuugagugaauccacaaauua

SEQ ID NO: 768 - RNA, 21 nt, Artificial Sequence
  Description of Artificial Sequence: Synthetic oligonucleotide
uuuucuccuuuucuaaugaua

SEQ ID NO: 769 - RNA, 21 nt, Artificial Sequence
  Description of Artificial Sequence: Synthetic oligonucleotide
uuuucuccuuuucuaaugaua

SEQ ID NO: 770 - RNA, 21 nt, Artificial Sequence
  Description of Artificial Sequence: Synthetic oligonucleotide
uaaugauuucaccauucagaa

SEQ ID NO: 771 - RNA, 21 nt, Artificial Sequence
  Description of Artificial Sequence: Synthetic oligonucleotide
auuucaccauucagaaacuca

SEQ ID NO: 772 - RNA, 21 nt, Artificial Sequence
  Description of Artificial Sequence: Synthetic oligonucleotide
auuucaccauucagaaacuca

SEQ ID NO: 773 - RNA, 21 nt, Artificial Sequence
  Description of Artificial Sequence: Synthetic oligonucleotide
aagaacaagccaacuguuuua

SEQ ID NO: 774 - RNA, 21 nt, Artificial Sequence
  Description of Artificial Sequence: Synthetic oligonucleotide
cuggaucuuucaacucgucga

SEQ ID NO: 775 - RNA, 21 nt, Artificial Sequence
  Description of Artificial Sequence: Synthetic oligonucleotide
guuuccagcuuauaccgauua

SEQ ID NO: 776 - RNA, 21 nt, Artificial Sequence
  Description of Artificial Sequence: Synthetic oligonucleotide
uucuaaaccucuguugcaaga

SEQ ID NO: 777 - RNA, 21 nt, Artificial Sequence
  Description of Artificial Sequence: Synthetic oligonucleotide
aaccucuguugcaaguguuua

SEQ ID NO: 778 - RNA, 21 nt, Artificial Sequence
  Description of Artificial Sequence: Synthetic oligonucleotide
aaccucuguugcaaguguuua

SEQ ID NO: 779 - RNA, 21 nt, Artificial Sequence
  Description of Artificial Sequence: Synthetic oligonucleotide
agcuuuccacaacagcuauga

SEQ ID NO: 780 - RNA, 21 nt, Artificial Sequence
  Description of Artificial Sequence: Synthetic oligonucleotide
uuaaaucuuccacacuugcga

SEQ ID NO: 781 - RNA, 21 nt, Artificial Sequence
  Description of Artificial Sequence: Synthetic oligonucleotide
uuaaaucuuccacacuugcga

SEQ ID NO: 782 - RNA, 21 nt, Artificial Sequence
  Description of Artificial Sequence: Synthetic oligonucleotide
aacucuuauuuagccauaaua

SEQ ID NO: 783 - RNA, 21 nt, Artificial Sequence
  Description of Artificial Sequence: Synthetic oligonucleotide
gagauuucaccuuacaugcua

SEQ ID NO: 784 - RNA, 21 nt, Artificial Sequence
  Description of Artificial Sequence: Synthetic oligonucleotide
auuccaauaucucagauugca

SEQ ID NO: 785 - RNA, 21 nt, Artificial Sequence
  Description of Artificial Sequence: Synthetic oligonucleotide
cugcuuuucacacuguaucca

SEQ ID NO: 786 - RNA, 21 nt, Artificial Sequence
  Description of Artificial Sequence: Synthetic oligonucleotide
gaauucagcugaauuagucua

SEQ ID NO: 787 - RNA, 21 nt, Artificial Sequence
  Description of Artificial Sequence: Synthetic oligonucleotide
accuaaaaacguaauuguuga

SEQ ID NO: 788 - RNA, 21 nt, Artificial Sequence
  Description of Artificial Sequence: Synthetic oligonucleotide
ugucaguacuccauugaugua

SEQ ID NO: 789 - RNA, 21 nt, Artificial Sequence
  Description of Artificial Sequence: Synthetic oligonucleotide
auucagaaacucauugagaca

SEQ ID NO: 790 - RNA, 21 nt, Artificial Sequence
  Description of Artificial Sequence: Synthetic oligonucleotide
uggaucuuucaacucgucgaa

SEQ ID NO: 791 - RNA, 21 nt, Artificial Sequence
  Description of Artificial Sequence: Synthetic oligonucleotide
caugaagugcaaaauuuagaa

SEQ ID NO: 792 - RNA, 21 nt, Artificial Sequence
  Description of Artificial Sequence: Synthetic oligonucleotide
agcaauccucaaauugucaga

SEQ ID NO: 793 - RNA, 21 nt, Artificial Sequence
  Description of Artificial Sequence: Synthetic oligonucleotide
accucuguugcaaguguuuua

SEQ ID NO: 794 - RNA, 21 nt, Artificial Sequence
  Description of Artificial Sequence: Synthetic oligonucleotide
accucuguugcaaguguuuua

SEQ ID NO: 795 - RNA, 21 nt, Artificial Sequence
  Description of Artificial Sequence: Synthetic oligonucleotide
uuggcuugguccuuuauuuca

SEQ ID NO: 796 - RNA, 21 nt, Artificial Sequence
  Description of Artificial Sequence: Synthetic oligonucleotide
gauaagacuucuaauuuaaga

SEQ ID NO: 797 - RNA, 21 nt, Artificial Sequence
  Description of Artificial Sequence: Synthetic oligonucleotide
ucucgaaaugacauuggacca

SEQ ID NO: 798 - RNA, 21 nt, Artificial Sequence
  Description of Artificial Sequence: Synthetic oligonucleotide
gaaacaguuuaaccugucaua

SEQ ID NO: 799 - RNA, 21 nt, Artificial Sequence
  Description of Artificial Sequence: Synthetic oligonucleotide
agaagcauauacauucuccua

SEQ ID NO: 800 - RNA, 21 nt, Artificial Sequence
  Description of Artificial Sequence: Synthetic oligonucleotide
agaagcauauacauucuccua

SEQ ID NO: 801 - RNA, 21 nt, Artificial Sequence
  Description of Artificial Sequence: Synthetic oligonucleotide
uugcugcuaugccuuucuuga

SEQ ID NO: 802 - RNA, 21 nt, Artificial Sequence
  Description of Artificial Sequence: Synthetic oligonucleotide
uaaucagaucagcaucuugga

SEQ ID NO: 803 - RNA, 21 nt, Artificial Sequence
  Description of Artificial Sequence: Synthetic oligonucleotide
cucugaaauuaucauccgaca

SEQ ID NO: 804 - RNA, 21 nt, Artificial Sequence
  Description of Artificial Sequence: Synthetic oligonucleotide
ggagaucucuuaguaaaucca

SEQ ID NO: 805 - RNA, 21 nt, Artificial Sequence
  Description of Artificial Sequence: Synthetic oligonucleotide
agaucucuuaguaaauccaga

SEQ ID NO: 806 - RNA, 21 nt, Artificial Sequence
  Description of Artificial Sequence: Synthetic oligonucleotide
agaucucuuaguaaauccaga

SEQ ID NO: 807 - RNA, 21 nt, Artificial Sequence
  Description of Artificial Sequence: Synthetic oligonucleotide
aggcucaccauuccaauauca

SEQ ID NO: 808 - RNA, 21 nt, Artificial Sequence
  Description of Artificial Sequence: Synthetic oligonucleotide
aggcucaccauuccaauauca

SEQ ID NO: 809 - RNA, 21 nt, Artificial Sequence
  Description of Artificial Sequence: Synthetic oligonucleotide
ggcucaccauuccaauaucua

SEQ ID NO: 810 - RNA, 21 nt, Artificial Sequence
  Description of Artificial Sequence: Synthetic oligonucleotide
gcucaccauuccaauaucuca

SEQ ID NO: 811 - RNA, 21 nt, Artificial Sequence
  Description of Artificial Sequence: Synthetic oligonucleotide
ucagccaugauuauauaccga

SEQ ID NO: 812 - RNA, 21 nt, Artificial Sequence
  Description of Artificial Sequence: Synthetic oligonucleotide
caaugugcugcuuuucacaca

SEQ ID NO: 813 - RNA, 21 nt, Artificial Sequence
  Description of Artificial Sequence: Synthetic oligonucleotide
ucacacuguaucccaaugcua

SEQ ID NO: 814 - RNA, 21 nt, Artificial Sequence
  Description of Artificial Sequence: Synthetic oligonucleotide
gcucaguacugcuguagaaua

SEQ ID NO: 815 - RNA, 21 nt, Artificial Sequence
  Description of Artificial Sequence: Synthetic oligonucleotide
ucaguacugcuguagaaugga

SEQ ID NO: 816 - RNA, 21 nt, Artificial Sequence
  Description of Artificial Sequence: Synthetic oligonucleotide
ucaguacugcuguagaaugga

SEQ ID NO: 817 - RNA, 21 nt, Artificial Sequence
  Description of Artificial Sequence: Synthetic oligonucleotide
uuugacauuuugaauucagca

SEQ ID NO: 818 - RNA, 21 nt, Artificial Sequence
  Description of Artificial Sequence: Synthetic oligonucleotide
gcugaauuagucugucugaca

SEQ ID NO: 819 - RNA, 21 nt, Artificial Sequence
  Description of Artificial Sequence: Synthetic oligonucleotide
ggucaucaauaccgaagauga

SEQ ID NO: 820 - RNA, 21 nt, Artificial Sequence
  Description of Artificial Sequence: Synthetic oligonucleotide
ggucaucaauaccgaagauga

SEQ ID NO: 821 - RNA, 21 nt, Artificial Sequence
  Description of Artificial Sequence: Synthetic oligonucleotide
cugcuccuuugaagauacuaa

SEQ ID NO: 822 - RNA, 21 nt, Artificial Sequence
  Description of Artificial Sequence: Synthetic oligonucleotide
caaucuuccacaugaagugca

SEQ ID NO: 823 - RNA, 21 nt, Artificial Sequence
  Description of Artificial Sequence: Synthetic oligonucleotide
caaucuuccacaugaagugca

SEQ ID NO: 824 - RNA, 21 nt, Artificial Sequence
  Description of Artificial Sequence: Synthetic oligonucleotide
ggguuuaagucuuauaggaua

SEQ ID NO: 825 - RNA, 21 nt, Artificial Sequence
  Description of Artificial Sequence: Synthetic oligonucleotide
ggguuuaagucuuauaggaua

SEQ ID NO: 826 - RNA, 21 nt, Artificial Sequence
  Description of Artificial Sequence: Synthetic oligonucleotide
ucucgugaacaagauguacga

SEQ ID NO: 827 - RNA, 21 nt, Artificial Sequence
  Description of Artificial Sequence: Synthetic oligonucleotide
ucucgugaacaagauguacga

SEQ ID NO: 828 - RNA, 21 nt, Artificial Sequence
  Description of Artificial Sequence: Synthetic oligonucleotide
aggaaaaguugaaccuucuua

SEQ ID NO: 829 - RNA, 21 nt, Artificial Sequence
  Description of Artificial Sequence: Synthetic oligonucleotide
aggaaaaguugaaccuucuua

SEQ ID NO: 830 - RNA, 21 nt, Artificial Sequence
  Description of Artificial Sequence: Synthetic oligonucleotide
ggaaaaguugaaccuucuuga

SEQ ID NO: 831 - RNA, 21 nt, Artificial Sequence
  Description of Artificial Sequence: Synthetic oligonucleotide
aaaguugaaccuucuuggcua

SEQ ID NO: 832 - RNA, 21 nt, Artificial Sequence
  Description of Artificial Sequence: Synthetic oligonucleotide
aaaguugaaccuucuuggcua

SEQ ID NO: 833 - RNA, 21 nt, Artificial Sequence
  Description of Artificial Sequence: Synthetic oligonucleotide
uuaguguaggagaauuuuaca

SEQ ID NO: 834 - RNA, 21 nt, Artificial Sequence
  Description of Artificial Sequence: Synthetic oligonucleotide
aaacuucaaucccauaugaga

SEQ ID NO: 835 - RNA, 21 nt, Artificial Sequence
  Description of Artificial Sequence: Synthetic oligonucleotide
cagcauuucuucucuggcuua

SEQ ID NO: 836 - RNA, 21 nt, Artificial Sequence
  Description of Artificial Sequence: Synthetic oligonucleotide
acaccugaauguuuuggagua

SEQ ID NO: 837 - RNA, 21 nt, Artificial Sequence
  Description of Artificial Sequence: Synthetic oligonucleotide
ccucagugguuuuagauccua

SEQ ID NO: 838 - RNA, 21 nt, Artificial Sequence
  Description of Artificial Sequence: Synthetic oligonucleotide
gcauauacauucuccugaaga

SEQ ID NO: 839 - RNA, 21 nt, Artificial Sequence
  Description of Artificial Sequence: Synthetic oligonucleotide
gaacuuaagggaacucuuaua

SEQ ID NO: 840 - RNA, 21 nt, Artificial Sequence
  Description of Artificial Sequence: Synthetic oligonucleotide
ucagcaucuuggacuugagua

SEQ ID NO: 841 - RNA, 21 nt, Artificial Sequence
  Description of Artificial Sequence: Synthetic oligonucleotide
uggaacuaagauccuuuccca

SEQ ID NO: 842 - RNA, 21 nt, Artificial Sequence
  Description of Artificial Sequence: Synthetic oligonucleotide
uggaacuaagauccuuuccca

SEQ ID NO: 843 - RNA, 21 nt, Artificial Sequence
  Description of Artificial Sequence: Synthetic oligonucleotide
uuuccaaugggauuuugguca

SEQ ID NO: 844 - RNA, 21 nt, Artificial Sequence
  Description of Artificial Sequence: Synthetic oligonucleotide
ugaagcuuauugucugguaga

SEQ ID NO: 845 - RNA, 21 nt, Artificial Sequence
  Description of Artificial Sequence: Synthetic oligonucleotide
ugaagcuuauugucugguaga

SEQ ID NO: 846 - RNA, 21 nt, Artificial Sequence
  Description of Artificial Sequence: Synthetic oligonucleotide
ggaaggagaucucuuaguaaa

SEQ ID NO: 847 - RNA, 21 nt, Artificial Sequence
  Description of Artificial Sequence: Synthetic oligonucleotide
aguaaauccagaucaaccaaa

SEQ ID NO: 848 - RNA, 21 nt, Artificial Sequence
  Description of Artificial Sequence: Synthetic oligonucleotide
gcuccagaguuucuccuagga

SEQ ID NO: 849 - RNA, 21 nt, Artificial Sequence
  Description of Artificial Sequence: Synthetic oligonucleotide
ccucacuagaacccuacagca

SEQ ID NO: 850 - RNA, 21 nt, Artificial Sequence
  Description of Artificial Sequence: Synthetic oligonucleotide
cugaugguuugagauaccuca

SEQ ID NO: 851 - RNA, 21 nt, Artificial Sequence
  Description of Artificial Sequence: Synthetic oligonucleotide
cagccaugauuauauaccgaa

SEQ ID NO: 852 - RNA, 21 nt, Artificial Sequence
  Description of Artificial Sequence: Synthetic oligonucleotide
ugcaaagauugcugacuacga

SEQ ID NO: 853 - RNA, 21 nt, Artificial Sequence
  Description of Artificial Sequence: Synthetic oligonucleotide
cugaauuagucugucugacga

SEQ ID NO: 854 - RNA, 21 nt, Artificial Sequence
  Description of Artificial Sequence: Synthetic oligonucleotide
gaggacagcucucauuucuua

SEQ ID NO: 855 - RNA, 21 nt, Artificial Sequence
  Description of Artificial Sequence: Synthetic oligonucleotide
uccuggucaucaauaccgaaa

SEQ ID NO: 856 - RNA, 21 nt, Artificial Sequence
  Description of Artificial Sequence: Synthetic oligonucleotide
auaggaaaugucaguacucca

SEQ ID NO: 857 - RNA, 21 nt, Artificial Sequence
  Description of Artificial Sequence: Synthetic oligonucleotide
cuccauugauguguuugagua

SEQ ID NO: 858 - RNA, 21 nt, Artificial Sequence
  Description of Artificial Sequence: Synthetic oligonucleotide
auguguuugagugaauccaca

SEQ ID NO: 859 - RNA, 21 nt, Artificial Sequence
  Description of Artificial Sequence: Synthetic oligonucleotide
gacaagaacaagccaacugua

SEQ ID NO: 860 - RNA, 21 nt, Artificial Sequence
  Description of Artificial Sequence: Synthetic oligonucleotide
agaacacugcucuuuggauaa

SEQ ID NO: 861 - RNA, 21 nt, Artificial Sequence
  Description of Artificial Sequence: Synthetic oligonucleotide
agaacacugcucuuuggauaa

SEQ ID NO: 862 - RNA, 21 nt, Artificial Sequence
  Description of Artificial Sequence: Synthetic oligonucleotide
cacaugaagugcaaaauuuaa

SEQ ID NO: 863 - RNA, 21 nt, Artificial Sequence
  Description of Artificial Sequence: Synthetic oligonucleotide
auaggaauugucuuuggauaa

SEQ ID NO: 864 - RNA, 21 nt, Artificial Sequence
  Description of Artificial Sequence: Synthetic oligonucleotide
auaggaauugucuuuggauaa

SEQ ID NO: 865 - RNA, 21 nt, Artificial Sequence
  Description of Artificial Sequence: Synthetic oligonucleotide
ucacacacugcagauguauca

SEQ ID NO: 866 - RNA, 21 nt, Artificial Sequence
  Description of Artificial Sequence: Synthetic oligonucleotide
ugucuggguuuaagucuuaua

SEQ ID NO: 867 - RNA, 21 nt, Artificial Sequence
  Description of Artificial Sequence: Synthetic oligonucleotide
aggauuucagacaaucuuaga

SEQ ID NO: 868 - RNA, 21 nt, Artificial Sequence
  Description of Artificial Sequence: Synthetic oligonucleotide
uuaccgagaugccguauuaca

SEQ ID NO: 869 - RNA, 21 nt, Artificial Sequence
  Description of Artificial Sequence: Synthetic oligonucleotide
acccucagugguuuuagauca

SEQ ID NO: 870 - RNA, 21 nt, Artificial Sequence
  Description of Artificial Sequence: Synthetic oligonucleotide
aguuuaaccugucauauaaca

SEQ ID NO: 871 - RNA, 21 nt, Artificial Sequence
  Description of Artificial Sequence: Synthetic oligonucleotide
aguuuaaccugucauauaaca

SEQ ID NO: 872 - RNA, 21 nt, Artificial Sequence
  Description of Artificial Sequence: Synthetic oligonucleotide
ugcugcuaugccuuucuugca

SEQ ID NO: 873 - RNA, 21 nt, Artificial Sequence
  Description of Artificial Sequence: Synthetic oligonucleotide
cugcuaugccuuucuugccua

SEQ ID NO: 874 - RNA, 21 nt, Artificial Sequence
  Description of Artificial Sequence: Synthetic oligonucleotide
uaaaucuuccacacuugcgga

SEQ ID NO: 875 - RNA, 21 nt, Artificial Sequence
  Description of Artificial Sequence: Synthetic oligonucleotide
aacuuaagggaacucuuauua

SEQ ID NO: 876 - RNA, 21 nt, Artificial Sequence
  Description of Artificial Sequence: Synthetic oligonucleotide
aucagcaucuuggacuugaga

SEQ ID NO: 877 - RNA, 21 nt, Artificial Sequence
  Description of Artificial Sequence: Synthetic oligonucleotide
aucagcaucuuggacuugaga

SEQ ID NO: 878 - RNA, 21 nt, Artificial Sequence
  Description of Artificial Sequence: Synthetic oligonucleotide
auaaccgaaugaaacuuauga

SEQ ID NO: 879 - RNA, 21 nt, Artificial Sequence
  Description of Artificial Sequence: Synthetic oligonucleotide
cacacauuuggauguuucuga

SEQ ID NO: 880 - RNA, 21 nt, Artificial Sequence
  Description of Artificial Sequence: Synthetic oligonucleotide
augcuuuggcaaaacuucgga

SEQ ID NO: 881 - RNA, 21 nt, Artificial Sequence
  Description of Artificial Sequence: Synthetic oligonucleotide
uccagacugcuauguagaaca

SEQ ID NO: 882 - RNA, 21 nt, Artificial Sequence
  Description of Artificial Sequence: Synthetic oligonucleotide
aaucaggaguccuucuucaua

SEQ ID NO: 883 - RNA, 21 nt, Artificial Sequence
  Description of Artificial Sequence: Synthetic oligonucleotide
gccuuauuuuccaaugggaua

SEQ ID NO: 884 - RNA, 21 nt, Artificial Sequence
  Description of Artificial Sequence: Synthetic oligonucleotide
gccuuauuuuccaaugggaua

SEQ ID NO: 885 - RNA, 21 nt, Artificial Sequence
  Description of Artificial Sequence: Synthetic oligonucleotide
aaaauuacaguuccuucuuga

SEQ ID NO: 886 - RNA, 21 nt, Artificial Sequence
  Description of Artificial Sequence: Synthetic oligonucleotide
aaucuuacuugaugacuugaa

SEQ ID NO: 887 - RNA, 21 nt, Artificial Sequence
  Description of Artificial Sequence: Synthetic oligonucleotide
guuggaauuugaacaagcuca

SEQ ID NO: 888 - RNA, 21 nt, Artificial Sequence
  Description of Artificial Sequence: Synthetic oligonucleotide
agcuccagaguuucuccuaga

SEQ ID NO: 889 - RNA, 21 nt, Artificial Sequence
  Description of Artificial Sequence: Synthetic oligonucleotide
cagaguuucuccuaggugaua

SEQ ID NO: 890 - RNA, 21 nt, Artificial Sequence
  Description of Artificial Sequence: Synthetic oligonucleotide
gccucacuagaacccuacaga

SEQ ID NO: 891 - RNA, 21 nt, Artificial Sequence
  Description of Artificial Sequence: Synthetic oligonucleotide
gccucacuagaacccuacaga

SEQ ID NO: 892 - RNA, 21 nt, Artificial Sequence
  Description of Artificial Sequence: Synthetic oligonucleotide
acucagccaugauuauauaca

SEQ ID NO: 893 - RNA, 21 nt, Artificial Sequence
  Description of Artificial Sequence: Synthetic oligonucleotide
acucagccaugauuauauaca

SEQ ID NO: 894 - RNA, 21 nt, Artificial Sequence
  Description of Artificial Sequence: Synthetic oligonucleotide
cucagccaugauuauauacca

SEQ ID NO: 895 - RNA, 21 nt, Artificial Sequence
  Description of Artificial Sequence: Synthetic oligonucleotide
cucagccaugauuauauacca

SEQ ID NO: 896 - RNA, 21 nt, Artificial Sequence
  Description of Artificial Sequence: Synthetic oligonucleotide
gccuuggugcaucuuccugua

SEQ ID NO: 897 - RNA, 21 nt, Artificial Sequence
  Description of Artificial Sequence: Synthetic oligonucleotide
gccuuggugcaucuuccugua

SEQ ID NO: 898 - RNA, 21 nt, Artificial Sequence
  Description of Artificial Sequence: Synthetic oligonucleotide
ccuuggugcaucuuccuguua

SEQ ID NO: 899 - RNA, 21 nt, Artificial Sequence
  Description of Artificial Sequence: Synthetic oligonucleotide
aucaauaccgaagaugggaaa

SEQ ID NO: 900 - RNA, 21 nt, Artificial Sequence
  Description of Artificial Sequence: Synthetic oligonucleotide
cuuguuuguauugcaauucca

SEQ ID NO: 901 - RNA, 21 nt, Artificial Sequence
  Description of Artificial Sequence: Synthetic oligonucleotide
cuuguuuguauugcaauucca

SEQ ID NO: 902 - RNA, 21 nt, Artificial Sequence
  Description of Artificial Sequence: Synthetic oligonucleotide
acuccauugauguguuugaga

SEQ ID NO: 903 - RNA, 21 nt, Artificial Sequence
  Description of Artificial Sequence: Synthetic oligonucleotide
gaaagagauacaaucuugcua

SEQ ID NO: 904 - RNA, 21 nt, Artificial Sequence
  Description of Artificial Sequence: Synthetic oligonucleotide
gaaagagauacaaucuugcua

SEQ ID NO: 905 - RNA, 21 nt, Artificial Sequence
  Description of Artificial Sequence: Synthetic oligonucleotide
cacuagcaagaauggugauca

SEQ ID NO: 906 - RNA, 21 nt, Artificial Sequence
  Description of Artificial Sequence: Synthetic oligonucleotide
ucuuccacacuugcggucuua

SEQ ID NO: 907 - RNA, 21 nt, Artificial Sequence
  Description of Artificial Sequence: Synthetic oligonucleotide
ucuuccacacuugcggucuua

SEQ ID NO: 908 - RNA, 21 nt, Artificial Sequence
  Description of Artificial Sequence: Synthetic oligonucleotide
cuuccacacuugcggucuuua

SEQ ID NO: 909 - RNA, 21 nt, Artificial Sequence
  Description of Artificial Sequence: Synthetic oligonucleotide
uugcggucuuuagauaugaga

SEQ ID NO: 910 - RNA, 21 nt, Artificial Sequence
  Description of Artificial Sequence: Synthetic oligonucleotide
uguaccuugcugucuaugaca

SEQ ID NO: 911 - RNA, 21 nt, Artificial Sequence
  Description of Artificial Sequence: Synthetic oligonucleotide
gcuuccucacgcaguucacua

SEQ ID NO: 912 - RNA, 21 nt, Artificial Sequence
  Description of Artificial Sequence: Synthetic oligonucleotide
cagugaaaguggaagguugua

SEQ ID NO: 913 - RNA, 21 nt, Artificial Sequence
  Description of Artificial Sequence: Synthetic oligonucleotide
cagugaaaguggaagguugua

SEQ ID NO: 914 - RNA, 21 nt, Artificial Sequence
  Description of Artificial Sequence: Synthetic oligonucleotide
gauggcaguuuuggaucagua

SEQ ID NO: 915 - RNA, 21 nt, Artificial Sequence
  Description of Artificial Sequence: Synthetic oligonucleotide
uucacacuguaucccaaugca

SEQ ID NO: 916 - RNA, 21 nt, Artificial Sequence
  Description of Artificial Sequence: Synthetic oligonucleotide
caucauugcaaagauugcuga

SEQ ID NO: 917 - RNA, 21 nt, Artificial Sequence
  Description of Artificial Sequence: Synthetic oligonucleotide
cucaguacugcuguagaauga

SEQ ID NO: 918 - RNA, 21 nt, Artificial Sequence
  Description of Artificial Sequence: Synthetic oligonucleotide
gaauuagucugucugacgaga

SEQ ID NO: 919 - RNA, 21 nt, Artificial Sequence
  Description of Artificial Sequence: Synthetic oligonucleotide
gaauuagucugucugacgaga

SEQ ID NO: 920 - RNA, 21 nt, Artificial Sequence
  Description of Artificial Sequence: Synthetic oligonucleotide
uaguagaauauugugcuuaga

SEQ ID NO: 921 - RNA, 21 nt, Artificial Sequence
  Description of Artificial Sequence: Synthetic oligonucleotide
gggacacagucugguacucua

SEQ ID NO: 922 - RNA, 21 nt, Artificial Sequence
  Description of Artificial Sequence: Synthetic oligonucleotide
cacagucugguacucuccuga

SEQ ID NO: 923 - RNA, 21 nt, Artificial Sequence
  Description of Artificial Sequence: Synthetic oligonucleotide
cacagucugguacucuccuga

SEQ ID NO: 924 - RNA, 21 nt, Artificial Sequence
  Description of Artificial Sequence: Synthetic oligonucleotide
gucaucaauaccgaagaugga

SEQ ID NO: 925 - RNA, 21 nt, Artificial Sequence
  Description of Artificial Sequence: Synthetic oligonucleotide
gucaucaauaccgaagaugga

SEQ ID NO: 926 - RNA, 21 nt, Artificial Sequence
  Description of Artificial Sequence: Synthetic oligonucleotide
gggaaaaagagacauacccua

SEQ ID NO: 927 - RNA, 21 nt, Artificial Sequence
  Description of Artificial Sequence: Synthetic oligonucleotide
aaagagacauacccuagaaaa

SEQ ID NO: 928 - RNA, 21 nt, Artificial Sequence
  Description of Artificial Sequence: Synthetic oligonucleotide
uacuaaauauaggaaauguca

SEQ ID NO: 929 - RNA, 21 nt, Artificial Sequence
  Description of Artificial Sequence: Synthetic oligonucleotide
uacuaaauauaggaaauguca

SEQ ID NO: 930 - RNA, 21 nt, Artificial Sequence
  Description of Artificial Sequence: Synthetic oligonucleotide
gauguguuugagugaauccaa

SEQ ID NO: 931 - RNA, 21 nt, Artificial Sequence
  Description of Artificial Sequence: Synthetic oligonucleotide
acaugaagugcaaaauuuaga

SEQ ID NO: 932 - RNA, 21 nt, Artificial Sequence
  Description of Artificial Sequence: Synthetic oligonucleotide
agugagaaaagaauuagcuga

SEQ ID NO: 933 - RNA, 21 nt, Artificial Sequence
  Description of Artificial Sequence: Synthetic oligonucleotide
aauuuucuugcugcuaugcca

SEQ ID NO: 934 - RNA, 21 nt, Artificial Sequence
  Description of Artificial Sequence: Synthetic oligonucleotide
gaauauuugcugguuccaaga

SEQ ID NO: 935 - RNA, 21 nt, Artificial Sequence
  Description of Artificial Sequence: Synthetic oligonucleotide
uuuuccaaugggauuuuggua

SEQ ID NO: 936 - RNA, 21 nt, Artificial Sequence
  Description of Artificial Sequence: Synthetic oligonucleotide
gguugcuggagauugauauua

SEQ ID NO: 937 - RNA, 21 nt, Artificial Sequence
  Description of Artificial Sequence: Synthetic oligonucleotide
ugaaggagaaacucuguugaa

SEQ ID NO: 938 - RNA, 21 nt, Artificial Sequence
  Description of Artificial Sequence: Synthetic oligonucleotide
ugauggcaguuuuggaucaga

SEQ ID NO: 939 - RNA, 21 nt, Artificial Sequence
  Description of Artificial Sequence: Synthetic oligonucleotide
ugauggcaguuuuggaucaga

SEQ ID NO: 940 - RNA, 21 nt, Artificial Sequence
  Description of Artificial Sequence: Synthetic oligonucleotide
gcaaagauugcugacuacgga

SEQ ID NO: 941 - RNA, 21 nt, Artificial Sequence
  Description of Artificial Sequence: Synthetic oligonucleotide
gcaaagauugcugacuacgga

SEQ ID NO: 942 - RNA, 21 nt, Artificial Sequence
  Description of Artificial Sequence: Synthetic oligonucleotide
cagucugguacucuccuggua

SEQ ID NO: 943 - RNA, 21 nt, Artificial Sequence
  Description of Artificial Sequence: Synthetic oligonucleotide
cuccuggucaucaauaccgaa

SEQ ID NO: 944 - RNA, 21 nt, Artificial Sequence
  Description of Artificial Sequence: Synthetic oligonucleotide
cuccuggucaucaauaccgaa

SEQ ID NO: 945 - RNA, 21 nt, Artificial Sequence
  Description of Artificial Sequence: Synthetic oligonucleotide
ccuggucaucaauaccgaaga

SEQ ID NO: 946 - RNA, 21 nt, Artificial Sequence
  Description of Artificial Sequence: Synthetic oligonucleotide
ccuggucaucaauaccgaaga

SEQ ID NO: 947 - RNA, 21 nt, Artificial Sequence
  Description of Artificial Sequence: Synthetic oligonucleotide
cuggucaucaauaccgaagaa

SEQ ID NO: 948 - RNA, 21 nt, Artificial Sequence
  Description of Artificial Sequence: Synthetic oligonucleotide
auaccgaagaugggaaaaaga

SEQ ID NO: 949 - RNA, 21 nt, Artificial Sequence
  Description of Artificial Sequence: Synthetic oligonucleotide
auaccgaagaugggaaaaaga

SEQ ID NO: 950 - RNA, 21 nt, Artificial Sequence
  Description of Artificial Sequence: Synthetic oligonucleotide
gcucuuuggauaggaacugga

SEQ ID NO: 951 - RNA, 21 nt, Artificial Sequence
  Description of Artificial Sequence: Synthetic oligonucleotide
gcucuuuggauaggaacugga

SEQ ID NO: 952 - RNA, 21 nt, Artificial Sequence
  Description of Artificial Sequence: Synthetic oligonucleotide
aaaauauuaagacaguuucca

SEQ ID NO: 953 - RNA, 21 nt, Artificial Sequence
  Description of Artificial Sequence: Synthetic oligonucleotide
aaaauauuaagacaguuucca

SEQ ID NO: 954 - RNA, 21 nt, Artificial Sequence
  Description of Artificial Sequence: Synthetic oligonucleotide
gaauggugaucagauaucaga

SEQ ID NO: 955 - RNA, 21 nt, Artificial Sequence
  Description of Artificial Sequence: Synthetic oligonucleotide
aggagaauuuuaccgagauga

SEQ ID NO: 956 - RNA, 21 nt, Artificial Sequence
  Description of Artificial Sequence: Synthetic oligonucleotide
uuuuaccgagaugccguauua

SEQ ID NO: 957 - RNA, 21 nt, Artificial Sequence
  Description of Artificial Sequence: Synthetic oligonucleotide
uuuuaccgagaugccguauua

SEQ ID NO: 958 - RNA, 21 nt, Artificial Sequence
  Description of Artificial Sequence: Synthetic oligonucleotide
cagaaugcacucacgagcuua

SEQ ID NO: 959 - RNA, 21 nt, Artificial Sequence
  Description of Artificial Sequence: Synthetic oligonucleotide
gaacuuucuugaggcuuguca

SEQ ID NO: 960 - RNA, 21 nt, Artificial Sequence
  Description of Artificial Sequence: Synthetic oligonucleotide
aaucuuccacacuugcgguca

SEQ ID NO: 961 - RNA, 21 nt, Artificial Sequence
  Description of Artificial Sequence: Synthetic oligonucleotide
aaucuuccacacuugcgguca

SEQ ID NO: 962 - RNA, 21 nt, Artificial Sequence
  Description of Artificial Sequence: Synthetic oligonucleotide
aaaggcucgcgcuucuucuua

SEQ ID NO: 963 - RNA, 21 nt, Artificial Sequence
  Description of Artificial Sequence: Synthetic oligonucleotide
uucucguuggcacacauuuga

SEQ ID NO: 964 - RNA, 21 nt, Artificial Sequence
  Description of Artificial Sequence: Synthetic oligonucleotide
aauuaucauccgacuauauga

SEQ ID NO: 965 - RNA, 21 nt, Artificial Sequence
  Description of Artificial Sequence: Synthetic oligonucleotide
uuacuuaaauuggucuccuga

SEQ ID NO: 966 - RNA, 21 nt, Artificial Sequence
  Description of Artificial Sequence: Synthetic oligonucleotide
uuauugucugguaggaucuga

SEQ ID NO: 967 - RNA, 21 nt, Artificial Sequence
  Description of Artificial Sequence: Synthetic oligonucleotide
uuauugucugguaggaucuga

SEQ ID NO: 968 - RNA, 21 nt, Artificial Sequence
  Description of Artificial Sequence: Synthetic oligonucleotide
uguagaaaaggcuguauucua

SEQ ID NO: 969 - RNA, 21 nt, Artificial Sequence
  Description of Artificial Sequence: Synthetic oligonucleotide
uguggaccacauugauucuca

SEQ ID NO: 970 - RNA, 21 nt, Artificial Sequence
  Description of Artificial Sequence: Synthetic oligonucleotide
uguggaccacauugauucuca

SEQ ID NO: 971 - RNA, 21 nt, Artificial Sequence
  Description of Artificial Sequence: Synthetic oligonucleotide
ggguugcuggagauugauaua

SEQ ID NO: 972 - RNA, 21 nt, Artificial Sequence
  Description of Artificial Sequence: Synthetic oligonucleotide
ugaccugccuagaaauauuaa

SEQ ID NO: 973 - RNA, 21 nt, Artificial Sequence
  Description of Artificial Sequence: Synthetic oligonucleotide
acacuguaucccaaugcugca

SEQ ID NO: 974 - RNA, 21 nt, Artificial Sequence
  Description of Artificial Sequence: Synthetic oligonucleotide
aagauugcugacuacggcaua

SEQ ID NO: 975 - RNA, 21 nt, Artificial Sequence
  Description of Artificial Sequence: Synthetic oligonucleotide
aagauugcugacuacggcaua

SEQ ID NO: 976 - RNA, 21 nt, Artificial Sequence
  Description of Artificial Sequence: Synthetic oligonucleotide
aacuggagguagaauaguaga

SEQ ID NO: 977 - RNA, 21 nt, Artificial Sequence
  Description of Artificial Sequence: Synthetic oligonucleotide
guagaggguuugaaguuucca

SEQ ID NO: 978 - RNA, 21 nt, Artificial Sequence
  Description of Artificial Sequence: Synthetic oligonucleotide
aguagaauauugugcuuagca

SEQ ID NO: 979 - RNA, 21 nt, Artificial Sequence
  Description of Artificial Sequence: Synthetic oligonucleotide
ugggacacagucugguacuca

SEQ ID NO: 980 - RNA, 21 nt, Artificial Sequence
  Description of Artificial Sequence: Synthetic oligonucleotide
ugggacacagucugguacuca

SEQ ID NO: 981 - RNA, 21 nt, Artificial Sequence
  Description of Artificial Sequence: Synthetic oligonucleotide
ucuccuggucaucaauaccga

SEQ ID NO: 982 - RNA, 21 nt, Artificial Sequence
  Description of Artificial Sequence: Synthetic oligonucleotide
caaaaugucuuauucugggaa

SEQ ID NO: 983 - RNA, 21 nt, Artificial Sequence
  Description of Artificial Sequence: Synthetic oligonucleotide
ugcacucacgagcuuuccaca

SEQ ID NO: 984 - RNA, 21 nt, Artificial Sequence
  Description of Artificial Sequence: Synthetic oligonucleotide
ugcacucacgagcuuuccaca

SEQ ID NO: 985 - RNA, 21 nt, Artificial Sequence
  Description of Artificial Sequence: Synthetic oligonucleotide
auaugagcagcaaugauauua

SEQ ID NO: 986 - RNA, 21 nt, Artificial Sequence
  Description of Artificial Sequence: Synthetic oligonucleotide
acgagagccuuaauuucaaga

SEQ ID NO: 987 - RNA, 21 nt, Artificial Sequence
  Description of Artificial Sequence: Synthetic oligonucleotide
aaugagcuuccucacgcagua

SEQ ID NO: 988 - RNA, 21 nt, Artificial Sequence
  Description of Artificial Sequence: Synthetic oligonucleotide
agugaaaguggaagguuguca

SEQ ID NO: 989 - RNA, 21 nt, Artificial Sequence
  Description of Artificial Sequence: Synthetic oligonucleotide
agugaaaguggaagguuguca

SEQ ID NO: 990 - RNA, 21 nt, Artificial Sequence
  Description of Artificial Sequence: Synthetic oligonucleotide
gcccaaacagaauguauugga

SEQ ID NO: 991 - RNA, 21 nt, Artificial Sequence
  Description of Artificial Sequence: Synthetic oligonucleotide
ccugaagcuuauugucuggua

SEQ ID NO: 992 - RNA, 21 nt, Artificial Sequence
  Description of Artificial Sequence: Synthetic oligonucleotide
gaagcuuauugucugguagga

SEQ ID NO: 993 - RNA, 21 nt, Artificial Sequence
  Description of Artificial Sequence: Synthetic oligonucleotide
gaagcuuauugucugguagga

SEQ ID NO: 994 - RNA, 21 nt, Artificial Sequence
  Description of Artificial Sequence: Synthetic oligonucleotide
gaccugccuagaaauauuaua

SEQ ID NO: 995 - RNA, 21 nt, Artificial Sequence
  Description of Artificial Sequence: Synthetic oligonucleotide
ccuccaaggguuccuuggaua

SEQ ID NO: 996 - RNA, 21 nt, Artificial Sequence
  Description of Artificial Sequence: Synthetic oligonucleotide
ccuccaaggguuccuuggaua

SEQ ID NO: 997 - RNA, 21 nt, Artificial Sequence
  Description of Artificial Sequence: Synthetic oligonucleotide
cacaaugugcugcuuuucaca

SEQ ID NO: 998 - RNA, 21 nt, Artificial Sequence
  Description of Artificial Sequence: Synthetic oligonucleotide
gagguagaauaguagagggua

SEQ ID NO: 999 - RNA, 21 nt, Artificial Sequence
  Description of Artificial Sequence: Synthetic oligonucleotide
ccaguuaaagaauaugguuga

SEQ ID NO: 1000 - RNA, 21 nt, Artificial Sequence
  Description of Artificial Sequence: Synthetic oligonucleotide
uagccuuggugcaucuuccua

SEQ ID NO: 1001 - RNA, 21 nt, Artificial Sequence
  Description of Artificial Sequence: Synthetic oligonucleotide
uagccuuggugcaucuuccua

SEQ ID NO: 1002 - RNA, 21 nt, Artificial Sequence
  Description of Artificial Sequence: Synthetic oligonucleotide
agucugguacucuccugguca

SEQ ID NO: 1003 - RNA, 21 nt, Artificial Sequence
  Description of Artificial Sequence: Synthetic oligonucleotide
caucaauaccgaagaugggaa

SEQ ID NO: 1004 - RNA, 21 nt, Artificial Sequence
  Description of Artificial Sequence: Synthetic oligonucleotide
uucuuuugguuggaaccgcua

SEQ ID NO: 1005 - RNA, 21 nt, Artificial Sequence
  Description of Artificial Sequence: Synthetic oligonucleotide
cuguuguggaagugugggaua

SEQ ID NO: 1006 - RNA, 21 nt, Artificial Sequence
  Description of Artificial Sequence: Synthetic oligonucleotide
ugcucuuuggauaggaacuga

SEQ ID NO: 1007 - RNA, 21 nt, Artificial Sequence
  Description of Artificial Sequence: Synthetic oligonucleotide
ugcucuuuggauaggaacuga

SEQ ID NO: 1008 - RNA, 21 nt, Artificial Sequence
  Description of Artificial Sequence: Synthetic oligonucleotide
auucggucagagucaugauga

SEQ ID NO: 1009 - RNA, 21 nt, Artificial Sequence
  Description of Artificial Sequence: Synthetic oligonucleotide
auucggucagagucaugauga

SEQ ID NO: 1010 - RNA, 21 nt, Artificial Sequence
  Description of Artificial Sequence: Synthetic oligonucleotide
uacuaaaauuuauaaggccga

SEQ ID NO: 1011 - RNA, 21 nt, Artificial Sequence
  Description of Artificial Sequence: Synthetic oligonucleotide
cuaaaauuuauaaggccgaua

SEQ ID NO: 1012 - RNA, 21 nt, Artificial Sequence
  Description of Artificial Sequence: Synthetic oligonucleotide
ggccaacaauagcauuugcca

SEQ ID NO: 1013 - RNA, 21 nt, Artificial Sequence
  Description of Artificial Sequence: Synthetic oligonucleotide
ggccaacaauagcauuugcca

SEQ ID NO: 1014 - RNA, 21 nt, Artificial Sequence
  Description of Artificial Sequence: Synthetic oligonucleotide
acuccugaauaagcgagggua

SEQ ID NO: 1015 - RNA, 21 nt, Artificial Sequence
  Description of Artificial Sequence: Synthetic oligonucleotide
cuuaaauuggucuccugaaga

SEQ ID NO: 1016 - RNA, 21 nt, Artificial Sequence
  Description of Artificial Sequence: Synthetic oligonucleotide
agcuuauugucugguaggaua

SEQ ID NO: 1017 - RNA, 21 nt, Artificial Sequence
  Description of Artificial Sequence: Synthetic oligonucleotide
agcuuauugucugguaggaua

SEQ ID NO: 1018 - RNA, 21 nt, Artificial Sequence
  Description of Artificial Sequence: Synthetic oligonucleotide
uugaagaaaugggcauuauaa

SEQ ID NO: 1019 - RNA, 21 nt, Artificial Sequence
  Description of Artificial Sequence: Synthetic oligonucleotide
uugaagaaaugggcauuauaa

SEQ ID NO: 1020 - RNA, 21 nt, Artificial Sequence
  Description of Artificial Sequence: Synthetic oligonucleotide
gcagaggaaggagaucucuua

SEQ ID NO: 1021 - RNA, 21 nt, Artificial Sequence
  Description of Artificial Sequence: Synthetic oligonucleotide
aauccagaucaaccaaggcua

SEQ ID NO: 1022 - RNA, 21 nt, Artificial Sequence
  Description of Artificial Sequence: Synthetic oligonucleotide
aauccagaucaaccaaggcua

SEQ ID NO: 1023 - RNA, 21 nt, Artificial Sequence
  Description of Artificial Sequence: Synthetic oligonucleotide
auccagaucaaccaaggcuca

SEQ ID NO: 1024 - RNA, 21 nt, Artificial Sequence
  Description of Artificial Sequence: Synthetic oligonucleotide
agaguuucuccuaggugauga

SEQ ID NO: 1025 - RNA, 21 nt, Artificial Sequence
  Description of Artificial Sequence: Synthetic oligonucleotide
agaguuucuccuaggugauga

SEQ ID NO: 1026 - RNA, 21 nt, Artificial Sequence
  Description of Artificial Sequence: Synthetic oligonucleotide
aauauugugcuuagccuugga

SEQ ID NO: 1027 - RNA, 21 nt, Artificial Sequence
  Description of Artificial Sequence: Synthetic oligonucleotide
auauugugcuuagccuuggua

SEQ ID NO: 1028 - RNA, 21 nt, Artificial Sequence
  Description of Artificial Sequence: Synthetic oligonucleotide
auauugugcuuagccuuggua

SEQ ID NO: 1029 - RNA, 21 nt, Artificial Sequence
  Description of Artificial Sequence: Synthetic oligonucleotide
uuuucuuuugguuggaaccga

SEQ ID NO: 1030 - RNA, 21 nt, Artificial Sequence
  Description of Artificial Sequence: Synthetic oligonucleotide
cuuuugguuggaaccgcugaa

SEQ ID NO: 1031 - RNA, 21 nt, Artificial Sequence
  Description of Artificial Sequence: Synthetic oligonucleotide
uagcccuguuguggaagugua

SEQ ID NO: 1032 - RNA, 21 nt, Artificial Sequence
  Description of Artificial Sequence: Synthetic oligonucleotide
uagcccuguuguggaagugua

SEQ ID NO: 1033 - RNA, 21 nt, Artificial Sequence
  Description of Artificial Sequence: Synthetic oligonucleotide
aggaauugucuuuggauagga

SEQ ID NO: 1034 - RNA, 21 nt, Artificial Sequence
  Description of Artificial Sequence: Synthetic oligonucleotide
uauucuuuugggccaaguuga

SEQ ID NO: 1035 - RNA, 21 nt, Artificial Sequence
  Description of Artificial Sequence: Synthetic oligonucleotide
auguuggugauggaguuagca

SEQ ID NO: 1036 - RNA, 21 nt, Artificial Sequence
  Description of Artificial Sequence: Synthetic oligonucleotide
auguuggugauggaguuagca

SEQ ID NO: 1037 - RNA, 21 nt, Artificial Sequence
  Description of Artificial Sequence: Synthetic oligonucleotide
auugcugacuacggcauugca

SEQ ID NO: 1038 - RNA, 21 nt, Artificial Sequence
  Description of Artificial Sequence: Synthetic oligonucleotide
ugauauucacaaacuggucca

SEQ ID NO: 1039 - RNA, 21 nt, Artificial Sequence
  Description of Artificial Sequence: Synthetic oligonucleotide
uuucuuuugguuggaaccgca

SEQ ID NO: 1040 - RNA, 21 nt, Artificial Sequence
  Description of Artificial Sequence: Synthetic oligonucleotide
uaaaaaugucaugcugguaua

SEQ ID NO: 1041 - RNA, 21 nt, Artificial Sequence
  Description of Artificial Sequence: Synthetic oligonucleotide
aaaaugucaugcugguauuga

SEQ ID NO: 1042 - RNA, 21 nt, Artificial Sequence
  Description of Artificial Sequence: Synthetic oligonucleotide
aaauauuaagacaguuuccca

SEQ ID NO: 1043 - RNA, 21 nt, Artificial Sequence
  Description of Artificial Sequence: Synthetic oligonucleotide
gaugcuagagagagcguguga

SEQ ID NO: 1044 - RNA, 21 nt, Artificial Sequence
  Description of Artificial Sequence: Synthetic oligonucleotide
caauauaaaggcucgcgcuua

SEQ ID NO: 1045 - RNA, 21 nt, Artificial Sequence
  Description of Artificial Sequence: Synthetic oligonucleotide
auaaaggcucgcgcuucuuca

SEQ ID NO: 1046 - RNA, 21 nt, Artificial Sequence
  Description of Artificial Sequence: Synthetic oligonucleotide
auaaaggcucgcgcuucuuca

SEQ ID NO: 1047 - RNA, 21 nt, Artificial Sequence
  Description of Artificial Sequence: Synthetic oligonucleotide
gugaaaguggaagguugucca

SEQ ID NO: 1048 - RNA, 21 nt, Artificial Sequence
  Description of Artificial Sequence: Synthetic oligonucleotide
gugaaaguggaagguugucca

SEQ ID NO: 1049 - RNA, 21 nt, Artificial Sequence
  Description of Artificial Sequence: Synthetic oligonucleotide
aaacagaauguauuggcgaca

SEQ ID NO: 1050 - RNA, 21 nt, Artificial Sequence
  Description of Artificial Sequence: Synthetic oligonucleotide
gaguuucuccuaggugaugga

SEQ ID NO: 1051 - RNA, 21 nt, Artificial Sequence
  Description of Artificial Sequence: Synthetic oligonucleotide
gaguuucuccuaggugaugga

SEQ ID NO: 1052 - RNA, 21 nt, Artificial Sequence
  Description of Artificial Sequence: Synthetic oligonucleotide
gauguuggugauggaguuaga

SEQ ID NO: 1053 - RNA, 21 nt, Artificial Sequence
  Description of Artificial Sequence: Synthetic oligonucleotide
gauguuggugauggaguuaga

SEQ ID NO: 1054 - RNA, 21 nt, Artificial Sequence
  Description of Artificial Sequence: Synthetic oligonucleotide
ugcugacuacggcauugcuca

SEQ ID NO: 1055 - RNA, 21 nt, Artificial Sequence
  Description of Artificial Sequence: Synthetic oligonucleotide
ucacaaacugguccuagcaga

SEQ ID NO: 1056 - RNA, 21 nt, Artificial Sequence
  Description of Artificial Sequence: Synthetic oligonucleotide
ucacaaacugguccuagcaga

SEQ ID NO: 1057 - RNA, 21 nt, Artificial Sequence
  Description of Artificial Sequence: Synthetic oligonucleotide
gcuuagccuuggugcaucuua

SEQ ID NO: 1058 - RNA, 21 nt, Artificial Sequence
  Description of Artificial Sequence: Synthetic oligonucleotide
cucuccuggucaucaauacca

SEQ ID NO: 1059 - RNA, 21 nt, Artificial Sequence
  Description of Artificial Sequence: Synthetic oligonucleotide
cucuccuggucaucaauacca

SEQ ID NO: 1060 - RNA, 21 nt, Artificial Sequence
  Description of Artificial Sequence: Synthetic oligonucleotide
ugggaaaaagagacauaccca

SEQ ID NO: 1061 - RNA, 21 nt, Artificial Sequence
  Description of Artificial Sequence: Synthetic oligonucleotide
gugcacuuuuuaagggaggua

SEQ ID NO: 1062 - RNA, 21 nt, Artificial Sequence
  Description of Artificial Sequence: Synthetic oligonucleotide
augucaugcugguauugggca

SEQ ID NO: 1063 - RNA, 21 nt, Artificial Sequence
  Description of Artificial Sequence: Synthetic oligonucleotide
augucaugcugguauugggca

SEQ ID NO: 1064 - RNA, 21 nt, Artificial Sequence
  Description of Artificial Sequence: Synthetic oligonucleotide
uauaaaggcucgcgcuucuua

SEQ ID NO: 1065 - RNA, 21 nt, Artificial Sequence
  Description of Artificial Sequence: Synthetic oligonucleotide
uuguggaacccaaguggcuua

SEQ ID NO: 1066 - RNA, 21 nt, Artificial Sequence
  Description of Artificial Sequence: Synthetic oligonucleotide
aaguuguggaccacauugaua

SEQ ID NO: 1067 - RNA, 21 nt, Artificial Sequence
  Description of Artificial Sequence: Synthetic oligonucleotide
ccaaggcucaccauuccaaua

SEQ ID NO: 1068 - RNA, 21 nt, Artificial Sequence
  Description of Artificial Sequence: Synthetic oligonucleotide
uuagccuccaaggguuccuua

SEQ ID NO: 1069 - RNA, 21 nt, Artificial Sequence
  Description of Artificial Sequence: Synthetic oligonucleotide
aaagauugcugacuacggcaa

SEQ ID NO: 1070 - RNA, 21 nt, Artificial Sequence
  Description of Artificial Sequence: Synthetic oligonucleotide
aaagauugcugacuacggcaa

SEQ ID NO: 1071 - RNA, 21 nt, Artificial Sequence
  Description of Artificial Sequence: Synthetic oligonucleotide
ucaucaauaccgaagauggga

SEQ ID NO: 1072 - RNA, 21 nt, Artificial Sequence
  Description of Artificial Sequence: Synthetic oligonucleotide
ucaucaauaccgaagauggga

SEQ ID NO: 1073 - RNA, 21 nt, Artificial Sequence
  Description of Artificial Sequence: Synthetic oligonucleotide
cuggaggaggccauauuuuaa

SEQ ID NO: 1074 - RNA, 21 nt, Artificial Sequence
  Description of Artificial Sequence: Synthetic oligonucleotide
ugucaugcugguauugggcua

SEQ ID NO: 1075 - RNA, 21 nt, Artificial Sequence
  Description of Artificial Sequence: Synthetic oligonucleotide
ugucaugcugguauugggcua

SEQ ID NO: 1076 - RNA, 21 nt, Artificial Sequence
  Description of Artificial Sequence: Synthetic oligonucleotide
aauauaaaggcucgcgcuuca

SEQ ID NO: 1077 - RNA, 21 nt, Artificial Sequence
  Description of Artificial Sequence: Synthetic oligonucleotide
ccugaauaagcgaggguucca

SEQ ID NO: 1078 - RNA, 21 nt, Artificial Sequence
  Description of Artificial Sequence: Synthetic oligonucleotide
aaucauggcacagauuuugaa

SEQ ID NO: 1079 - RNA, 21 nt, Artificial Sequence
  Description of Artificial Sequence: Synthetic oligonucleotide
cuuuugggccaaguuguggaa

SEQ ID NO: 1080 - RNA, 21 nt, Artificial Sequence
  Description of Artificial Sequence: Synthetic oligonucleotide
cuuuugggccaaguuguggaa

SEQ ID NO: 1081 - RNA, 21 nt, Artificial Sequence
  Description of Artificial Sequence: Synthetic oligonucleotide
aagaaugguuuccuggguuga

SEQ ID NO: 1082 - RNA, 21 nt, Artificial Sequence
  Description of Artificial Sequence: Synthetic oligonucleotide
auuugaacaagcuccagagua

SEQ ID NO: 1083 - RNA, 21 nt, Artificial Sequence
  Description of Artificial Sequence: Synthetic oligonucleotide
uguuggugauggaguuagcca

SEQ ID NO: 1084 - RNA, 21 nt, Artificial Sequence
  Description of Artificial Sequence: Synthetic oligonucleotide
agccaugauuauauaccgaga

SEQ ID NO: 1085 - RNA, 21 nt, Artificial Sequence
  Description of Artificial Sequence: Synthetic oligonucleotide
caaagauugcugacuacggca

SEQ ID NO: 1086 - RNA, 21 nt, Artificial Sequence
  Description of Artificial Sequence: Synthetic oligonucleotide
gaggauguggcacaaagauua

SEQ ID NO: 1087 - RNA, 21 nt, Artificial Sequence
  Description of Artificial Sequence: Synthetic oligonucleotide
gaggauguggcacaaagauua

SEQ ID NO: 1088 - RNA, 23 nt, Artificial Sequence
  Description of Artificial Sequence: Synthetic oligonucleotide
uauagaagagucaggaauaaagg

SEQ ID NO: 1089 - DNA, 23 bp, Artificial Sequence
  Description of Artificial Sequence: Synthetic oligonucleotide
  Description of Combined DNA/RNA Molecule: Synthetic oligonucleotide
uauagaagagucaggaauaaagg

SEQ ID NO: 1090 - DNA, 23 bp, Artificial Sequence
  Description of Artificial Sequence: Synthetic oligonucleotide
  Description of Combined DNA/RNA Molecule: Synthetic oligonucleotide
ugucaaaaugucauagaguagua

SEQ ID NO: 1091 - RNA, 23 nt, Artificial Sequence
  Description of Artificial Sequence: Synthetic oligonucleotide
ucagacagacuaauucagcugaa

SEQ ID NO: 1092 - DNA, 23 bp, Artificial Sequence
  Description of Artificial Sequence: Synthetic oligonucleotide
  Description of Combined DNA/RNA Molecule: Synthetic oligonucleotide
ucagacagacuaauucagcugaa

SEQ ID NO: 1093 - RNA, 23 nt, Artificial Sequence
  Description of Artificial Sequence: Synthetic oligonucleotide
ugaauaagacauuuuguguuuug

SEQ ID NO: 1094 - DNA, 23 bp, Artificial Sequence
  Description of Artificial Sequence: Synthetic oligonucleotide
  Description of Combined DNA/RNA Molecule: Synthetic oligonucleotide
ugaataagacatuuuguguuuug

SEQ ID NO: 1095 - RNA, 23 nt, Artificial Sequence
  Description of Artificial Sequence: Synthetic oligonucleotide
uaaacuguuucagaguuggacau

SEQ ID NO: 1096 - RNA, 23 nt, Artificial Sequence
  Description of Artificial Sequence: Synthetic oligonucleotide
ugugacauguaguucuuuggaaa

SEQ ID NO: 1097 - DNA, 23 bp, Artificial Sequence
  Description of Artificial Sequence: Synthetic oligonucleotide
  Description of Combined DNA/RNA Molecule: Synthetic oligonucleotide
ucaauctgagauauuggaauggu

SEQ ID NO: 1098 - DNA, 23 bp, Artificial Sequence
  Description of Artificial Sequence: Synthetic oligonucleotide
  Description of Combined DNA/RNA Molecule: Synthetic oligonucleotide
ucaatctgagatauuggaauggu

SEQ ID NO: 1099 - DNA, 23 bp, Artificial Sequence
  Description of Artificial Sequence: Synthetic oligonucleotide
  Description of Combined DNA/RNA Molecule: Synthetic oligonucleotide
uaacauaauautucuaggcaggu

SEQ ID NO: 1100 - RNA, 23 nt, Artificial Sequence
  Description of Artificial Sequence: Synthetic oligonucleotide
ugauacagugugaaaagcagcac

SEQ ID NO: 1101 - RNA, 23 nt, Artificial Sequence
  Description of Artificial Sequence: Synthetic oligonucleotide
uguuguaacugacauccagagau

SEQ ID NO: 1102 - RNA, 23 nt, Artificial Sequence
  Description of Artificial Sequence: Synthetic oligonucleotide
uagcaagguacaaugcucgcugc

SEQ ID NO: 1103 - RNA, 23 nt, Artificial Sequence
  Description of Artificial Sequence: Synthetic oligonucleotide
uuccaugagagaaucaauguggu

SEQ ID NO: 1104 - RNA, 23 nt, Artificial Sequence
  Description of Artificial Sequence: Synthetic oligonucleotide
uaacacaucaauggaguacugac

SEQ ID NO: 1105 - RNA, 23 nt, Artificial Sequence
  Description of Artificial Sequence: Synthetic oligonucleotide
uugaauggugaaaucauuagaaa

SEQ ID NO: 1106 - DNA, 23 bp, Artificial Sequence
  Description of Artificial Sequence: Synthetic oligonucleotide
  Description of Combined DNA/RNA Molecule: Synthetic oligonucleotide
ucugaatggugaaaucauuagaa

SEQ ID NO: 1107 - DNA, 23 bp, Artificial Sequence
  Description of Artificial Sequence: Synthetic oligonucleotide
  Description of Combined DNA/RNA Molecule: Synthetic oligonucleotide
ucucaatgagutucugaauggug

SEQ ID NO: 1108 - RNA, 23 nt, Artificial Sequence
  Description of Artificial Sequence: Synthetic oligonucleotide
ugacgaguugaaagauccaggag

SEQ ID NO: 1109 - DNA, 23 bp, Artificial Sequence
  Description of Artificial Sequence: Synthetic oligonucleotide
  Description of Combined DNA/RNA Molecule: Synthetic oligonucleotide
ugacgaguugaaagauccaggag

SEQ ID NO: 1110 - RNA, 23 nt, Artificial Sequence
  Description of Artificial Sequence: Synthetic oligonucleotide
uacuucauguggaagauugaugu

SEQ ID NO: 1111 - RNA, 23 nt, Artificial Sequence
  Description of Artificial Sequence: Synthetic oligonucleotide
uguccaaugucauuucgagagac

SEQ ID NO: 1112 - DNA, 23 bp, Artificial Sequence
  Description of Artificial Sequence: Synthetic oligonucleotide
  Description of Combined DNA/RNA Molecule: Synthetic oligonucleotide
uguccaaugucauuucgagagac

SEQ ID NO: 1113 - DNA, 23 bp, Artificial Sequence
  Description of Artificial Sequence: Synthetic oligonucleotide
  Description of Combined DNA/RNA Molecule: Synthetic oligonucleotide
ucuaaagaccgcaaguguggaag

SEQ ID NO: 1114 - DNA, 23 bp, Artificial Sequence
  Description of Artificial Sequence: Synthetic oligonucleotide
  Description of Combined DNA/RNA Molecule: Synthetic oligonucleotide
ugcuaaauaagaguucccuuaag

SEQ ID NO: 1115 - DNA, 23 bp, Artificial Sequence
  Description of Artificial Sequence: Synthetic oligonucleotide
  Description of Combined DNA/RNA Molecule: Synthetic oligonucleotide
uagaaagaugcaguuucucuacu

SEQ ID NO: 1116 - RNA, 23 nt, Artificial Sequence
  Description of Artificial Sequence: Synthetic oligonucleotide
uauccagagaugucagauuuuca

SEQ ID NO: 1117 - RNA, 23 nt, Artificial Sequence
  Description of Artificial Sequence: Synthetic oligonucleotide
ugcaaucuggaauuuuucuagga

SEQ ID NO: 1118 - DNA, 23 bp, Artificial Sequence
  Description of Artificial Sequence: Synthetic oligonucleotide
  Description of Combined DNA/RNA Molecule: Synthetic oligonucleotide
ugcaaucuggaauuuuucuagga

SEQ ID NO: 1119 - DNA, 23 bp, Artificial Sequence
  Description of Artificial Sequence: Synthetic oligonucleotide
  Description of Combined DNA/RNA Molecule: Synthetic oligonucleotide
ucauguaaggugaaaucucaagu

SEQ ID NO: 1120 - DNA, 23 bp, Artificial Sequence
  Description of Artificial Sequence: Synthetic oligonucleotide
  Description of Combined DNA/RNA Molecule: Synthetic oligonucleotide
uuuuactaagagaucuccuuccu

SEQ ID NO: 1121 - RNA, 23 nt, Artificial Sequence
  Description of Artificial Sequence: Synthetic oligonucleotide
ugauuuacuaagagaucuccuuc

SEQ ID NO: 1122 - DNA, 23 bp, Artificial Sequence
  Description of Artificial Sequence: Synthetic oligonucleotide
  Description of Combined DNA/RNA Molecule: Synthetic oligonucleotide
uggcaatcugagauauuggaaug

SEQ ID NO: 1123 - DNA, 23 bp, Artificial Sequence
  Description of Artificial Sequence: Synthetic oligonucleotide
  Description of Combined DNA/RNA Molecule: Synthetic oligonucleotide
uggcaatcugagauauuggaaug

SEQ ID NO: 1124 - DNA, 23 bp, Artificial Sequence
  Description of Artificial Sequence: Synthetic oligonucleotide
  Description of Combined DNA/RNA Molecule: Synthetic oligonucleotide
uucacctaggagaaacucuggag

SEQ ID NO: 1125 - DNA, 23 bp, Artificial Sequence
  Description of Artificial Sequence: Synthetic oligonucleotide
  Description of Combined DNA/RNA Molecule: Synthetic oligonucleotide
uaucaatggagtacugacauuuc

SEQ ID NO: 1126 - RNA, 23 nt, Artificial Sequence
  Description of Artificial Sequence: Synthetic oligonucleotide
uaauuuguggauucacucaaaca

SEQ ID NO: 1127 - DNA, 23 bp, Artificial Sequence
  Description of Artificial Sequence: Synthetic oligonucleotide
  Description of Combined DNA/RNA Molecule: Synthetic oligonucleotide
uaucautagaaaaggagaaaauc

SEQ ID NO: 1128 - DNA, 23 bp, Artificial Sequence
  Description of Artificial Sequence: Synthetic oligonucleotide
  Description of Combined DNA/RNA Molecule: Synthetic oligonucleotide
uaucautagaaaaggagaaaauc

SEQ ID NO: 1129 - RNA, 23 nt, Artificial Sequence
  Description of Artificial Sequence: Synthetic oligonucleotide
uucugaauggugaaaucauuaga

SEQ ID NO: 1130 - DNA, 23 bp, Artificial Sequence
  Description of Artificial Sequence: Synthetic oligonucleotide
  Description of Combined DNA/RNA Molecule: Synthetic oligonucleotide
ugaguutcugaauggugaaauca

SEQ ID NO: 1131 - DNA, 23 bp, Artificial Sequence
  Description of Artificial Sequence: Synthetic oligonucleotide
  Description of Combined DNA/RNA Molecule: Synthetic oligonucleotide
ugagtutcugaauggugaaauca

SEQ ID NO: 1132 - RNA, 23 nt, Artificial Sequence
  Description of Artificial Sequence: Synthetic oligonucleotide
uaaaacaguuggcuuguucuugu

SEQ ID NO: 1133 - DNA, 23 bp, Artificial Sequence
  Description of Artificial Sequence: Synthetic oligonucleotide
  Description of Combined DNA/RNA Molecule: Synthetic oligonucleotide
ucgacgaguugaaagauccagga

SEQ ID NO: 1134 - RNA, 23 nt, Artificial Sequence
  Description of Artificial Sequence: Synthetic oligonucleotide
uaaucgguauaagcuggaaacca

SEQ ID NO: 1135 - RNA, 23 nt, Artificial Sequence
  Description of Artificial Sequence: Synthetic oligonucleotide
ucuugcaacagagguuuagaaac

SEQ ID NO: 1136 - RNA, 23 nt, Artificial Sequence
  Description of Artificial Sequence: Synthetic oligonucleotide
uaaacacuugcaacagagguuua

SEQ ID NO: 1137 - DNA, 23 bp, Artificial Sequence
  Description of Artificial Sequence: Synthetic oligonucleotide
  Description of Combined DNA/RNA Molecule: Synthetic oligonucleotide
uaaacacuugcaacagagguuua

SEQ ID NO: 1138 - RNA, 23 nt, Artificial Sequence
  Description of Artificial Sequence: Synthetic oligonucleotide
ucauagcuguuguggaaagcucg

SEQ ID NO: 1139 - RNA, 23 nt, Artificial Sequence
  Description of Artificial Sequence: Synthetic oligonucleotide
ucgcaaguguggaagauuuaaaa

SEQ ID NO: 1140 - DNA, 23 bp, Artificial Sequence
  Description of Artificial Sequence: Synthetic oligonucleotide
  Description of Combined DNA/RNA Molecule: Synthetic oligonucleotide
ucgcaaguguggaagauuuaaaa

SEQ ID NO: 1141 - RNA, 23 nt, Artificial Sequence
  Description of Artificial Sequence: Synthetic oligonucleotide
uauuauggcuaaauaagaguucc

SEQ ID NO: 1142 - RNA, 23 nt, Artificial Sequence
  Description of Artificial Sequence: Synthetic oligonucleotide
uagcauguaaggugaaaucucaa

SEQ ID NO: 1143 - RNA, 23 nt, Artificial Sequence
  Description of Artificial Sequence: Synthetic oligonucleotide
ugcaaucugagauauuggaaugg

SEQ ID NO: 1144 - RNA, 23 nt, Artificial Sequence
  Description of Artificial Sequence: Synthetic oligonucleotide
uggauacagugugaaaagcagca

SEQ ID NO: 1145 - DNA, 23 bp, Artificial Sequence
  Description of Artificial Sequence: Synthetic oligonucleotide
  Description of Combined DNA/RNA Molecule: Synthetic oligonucleotide
uagacuaauucagcugaauucaa

SEQ ID NO: 1146 - DNA, 23 bp, Artificial Sequence
  Description of Artificial Sequence: Synthetic oligonucleotide
  Description of Combined DNA/RNA Molecule: Synthetic oligonucleotide
ucaacaauuacguuuuuagguaa

SEQ ID NO: 1147 - DNA, 23 bp, Artificial Sequence
  Description of Artificial Sequence: Synthetic oligonucleotide
  Description of Combined DNA/RNA Molecule: Synthetic oligonucleotide
uacatcaauggaguacugacauu

SEQ ID NO: 1148 - RNA, 23 nt, Artificial Sequence
  Description of Artificial Sequence: Synthetic oligonucleotide
ugucucaaugaguuucugaaugg

SEQ ID NO: 1149 - DNA, 23 bp, Artificial Sequence
  Description of Artificial Sequence: Synthetic oligonucleotide
  Description of Combined DNA/RNA Molecule: Synthetic oligonucleotide
utcgacgaguugaaagauccagg

SEQ ID NO: 1150 - DNA, 23 bp, Artificial Sequence
  Description of Artificial Sequence: Synthetic oligonucleotide
  Description of Combined DNA/RNA Molecule: Synthetic oligonucleotide
utcuaaauuuugcacuucaugug

SEQ ID NO: 1151 - DNA, 23 bp, Artificial Sequence
  Description of Artificial Sequence: Synthetic oligonucleotide
  Description of Combined DNA/RNA Molecule: Synthetic oligonucleotide
ucugacaauuugaggauugcuaa

SEQ ID NO: 1152 - RNA, 23 nt, Artificial Sequence
  Description of Artificial Sequence: Synthetic oligonucleotide
uaaaacacuugcaacagagguuu

SEQ ID NO: 1153 - DNA, 23 bp, Artificial Sequence
  Description of Artificial Sequence: Synthetic oligonucleotide
  Description of Combined DNA/RNA Molecule: Synthetic oligonucleotide
uaaaacacuugcaacagagguuu

SEQ ID NO: 1154 - DNA, 23 bp, Artificial Sequence
  Description of Artificial Sequence: Synthetic oligonucleotide
  Description of Combined DNA/RNA Molecule: Synthetic oligonucleotide
ugaaauaaaggaccaagccaaga

SEQ ID NO: 1155 - DNA, 23 bp, Artificial Sequence
  Description of Artificial Sequence: Synthetic oligonucleotide
  Description of Combined DNA/RNA Molecule: Synthetic oligonucleotide
ucuuaaauuagaagucuuaucug

SEQ ID NO: 1156 - RNA, 23 nt, Artificial Sequence
  Description of Artificial Sequence: Synthetic oligonucleotide
ugguccaaugucauuucgagaga

SEQ ID NO: 1157 - RNA, 23 nt, Artificial Sequence
  Description of Artificial Sequence: Synthetic oligonucleotide
uaugacagguuaaacuguuucag

SEQ ID NO: 1158 - RNA, 23 nt, Artificial Sequence
  Description of Artificial Sequence: Synthetic oligonucleotide
uaggagaauguauaugcuucugc

SEQ ID NO: 1159 - DNA, 23 bp, Artificial Sequence
  Description of Artificial Sequence: Synthetic oligonucleotide
  Description of Combined DNA/RNA Molecule: Synthetic oligonucleotide
uaggagaauguauaugcuucugc

SEQ ID NO: 1160 - DNA, 23 bp, Artificial Sequence
  Description of Artificial Sequence: Synthetic oligonucleotide
  Description of Combined DNA/RNA Molecule: Synthetic oligonucleotide
ucaagaaaggcauagcagcaaga

SEQ ID NO: 1161 - DNA, 23 bp, Artificial Sequence
  Description of Artificial Sequence: Synthetic oligonucleotide
  Description of Combined DNA/RNA Molecule: Synthetic oligonucleotide
uccaagaugcugaucugauuaug

SEQ ID NO: 1162 - RNA, 23 nt, Artificial Sequence
  Description of Artificial Sequence: Synthetic oligonucleotide
ugucggaugauaauuucagaguu

SEQ ID NO: 1163 - DNA, 23 bp, Artificial Sequence
  Description of Artificial Sequence: Synthetic oligonucleotide
  Description of Combined DNA/RNA Molecule: Synthetic oligonucleotide
uggauutacuaagagaucuccuu

SEQ ID NO: 1164 - DNA, 23 bp, Artificial Sequence
  Description of Artificial Sequence: Synthetic oligonucleotide
  Description of Combined DNA/RNA Molecule: Synthetic oligonucleotide
ucuggatuuacuaagagaucucc

SEQ ID NO: 1165 - DNA, 23 bp, Artificial Sequence
  Description of Artificial Sequence: Synthetic oligonucleotide
  Description of Combined DNA/RNA Molecule: Synthetic oligonucleotide
ucuggatuuactaagagaucucc

SEQ ID NO: 1166 - DNA, 23 bp, Artificial Sequence
  Description of Artificial Sequence: Synthetic oligonucleotide
  Description of Combined DNA/RNA Molecule: Synthetic oligonucleotide
ugauautggaauggugagccuug

SEQ ID NO: 1167 - DNA, 23 bp, Artificial Sequence
  Description of Artificial Sequence: Synthetic oligonucleotide
  Description of Combined DNA/RNA Molecule: Synthetic oligonucleotide
ugauautggaatggugagccuug

SEQ ID NO: 1168 - DNA, 23 bp, Artificial Sequence
  Description of Artificial Sequence: Synthetic oligonucleotide
  Description of Combined DNA/RNA Molecule: Synthetic oligonucleotide
uagatatuggaauggugagccuu

SEQ ID NO: 1169 - DNA, 23 bp, Artificial Sequence
  Description of Artificial Sequence: Synthetic oligonucleotide
  Description of Combined DNA/RNA Molecule: Synthetic oligonucleotide
ugagauauuggaauggugagccu

SEQ ID NO: 1170 - DNA, 23 bp, Artificial Sequence
  Description of Artificial Sequence: Synthetic oligonucleotide
  Description of Combined DNA/RNA Molecule: Synthetic oligonucleotide
ucggtatauaatcauggcugagu

SEQ ID NO: 1171 - RNA, 23 nt, Artificial Sequence
  Description of Artificial Sequence: Synthetic oligonucleotide
ugugugaaaagcagcacauugug

SEQ ID NO: 1172 - DNA, 23 bp, Artificial Sequence
  Description of Artificial Sequence: Synthetic oligonucleotide
  Description of Combined DNA/RNA Molecule: Synthetic oligonucleotide
uagcautgggatacagugugaaa

SEQ ID NO: 1173 - RNA, 23 nt, Artificial Sequence
  Description of Artificial Sequence: Synthetic oligonucleotide
uauucuacagcaguacugagcaa

SEQ ID NO: 1174 - RNA, 23 nt, Artificial Sequence
  Description of Artificial Sequence: Synthetic oligonucleotide
uccauucuacagcaguacugagc

SEQ ID NO: 1175 - DNA, 23 bp, Artificial Sequence
  Description of Artificial Sequence: Synthetic oligonucleotide
  Description of Combined DNA/RNA Molecule: Synthetic oligonucleotide
uccatucuacagcaguacugagc

SEQ ID NO: 1176 - RNA, 23 nt, Artificial Sequence
  Description of Artificial Sequence: Synthetic oligonucleotide
ugcugaauucaaaaugucaaaga

SEQ ID NO: 1177 - RNA, 23 nt, Artificial Sequence
  Description of Artificial Sequence: Synthetic oligonucleotide
ugucagacagacuaauucagcug

SEQ ID NO: 1178 - DNA, 23 bp, Artificial Sequence
  Description of Artificial Sequence: Synthetic oligonucleotide
  Description of Combined DNA/RNA Molecule: Synthetic oligonucleotide
ucaucutcgguauugaugaccag

SEQ ID NO: 1179 - DNA, 23 bp, Artificial Sequence
  Description of Artificial Sequence: Synthetic oligonucleotide
  Description of Combined DNA/RNA Molecule: Synthetic oligonucleotide
ucaucutcgguauugaugaccag

SEQ ID NO: 1180 - DNA, 23 bp, Artificial Sequence
  Description of Artificial Sequence: Synthetic oligonucleotide
  Description of Combined DNA/RNA Molecule: Synthetic oligonucleotide
uuaguatcuucaaaggagcagcu

SEQ ID NO: 1181 - DNA, 23 bp, Artificial Sequence
  Description of Artificial Sequence: Synthetic oligonucleotide
  Description of Combined DNA/RNA Molecule: Synthetic oligonucleotide
ugcacutcauguggaagauugau

SEQ ID NO: 1182 - DNA, 23 bp, Artificial Sequence
  Description of Artificial Sequence: Synthetic oligonucleotide
  Description of Combined DNA/RNA Molecule: Synthetic oligonucleotide
ugcacutcaugtggaagauugau

SEQ ID NO: 1183 - RNA, 23 nt, Artificial Sequence
  Description of Artificial Sequence: Synthetic oligonucleotide
uauccuauaagacuuaaacccag

SEQ ID NO: 1184 - DNA, 23 bp, Artificial Sequence
  Description of Artificial Sequence: Synthetic oligonucleotide
  Description of Combined DNA/RNA Molecule: Synthetic oligonucleotide
uauccuauaagacuuaaacccag

SEQ ID NO: 1185 - RNA, 23 nt, Artificial Sequence
  Description of Artificial Sequence: Synthetic oligonucleotide
ucguacaucuuguucacgagauc

SEQ ID NO: 1186 - DNA, 23 bp, Artificial Sequence
  Description of Artificial Sequence: Synthetic oligonucleotide
  Description of Combined DNA/RNA Molecule: Synthetic oligonucleotide
ucguacaucuuguucacgagauc

SEQ ID NO: 1187 - RNA, 23 nt, Artificial Sequence
  Description of Artificial Sequence: Synthetic oligonucleotide
uaagaagguucaacuuuuccuau

SEQ ID NO: 1188 - DNA, 23 bp, Artificial Sequence
  Description of Artificial Sequence: Synthetic oligonucleotide
  Description of Combined DNA/RNA Molecule: Synthetic oligonucleotide
uaagaagguucaacuuuuccuau

SEQ ID NO: 1189 - DNA, 23 bp, Artificial Sequence
  Description of Artificial Sequence: Synthetic oligonucleotide
  Description of Combined DNA/RNA Molecule: Synthetic oligonucleotide
ucaagaagguucaacuuuuccua

SEQ ID NO: 1190 - RNA, 23 nt, Artificial Sequence
  Description of Artificial Sequence: Synthetic oligonucleotide
uagccaagaagguucaacuuuuc

SEQ ID NO: 1191 - DNA, 23 bp, Artificial Sequence
  Description of Artificial Sequence: Synthetic oligonucleotide
  Description of Combined DNA/RNA Molecule: Synthetic oligonucleotide
uagccaagaagguucaacuuuuc

SEQ ID NO: 1192 - DNA, 23 bp, Artificial Sequence
  Description of Artificial Sequence: Synthetic oligonucleotide
  Description of Combined DNA/RNA Molecule: Synthetic oligonucleotide
uguaaaauucuccuacacuaauu

SEQ ID NO: 1193 - DNA, 23 bp, Artificial Sequence
  Description of Artificial Sequence: Synthetic oligonucleotide
  Description of Combined DNA/RNA Molecule: Synthetic oligonucleotide
ucucauaugggauugaaguuuug

SEQ ID NO: 1194 - RNA, 23 nt, Artificial Sequence
  Description of Artificial Sequence: Synthetic oligonucleotide
uaagccagagaagaaaugcuguc

SEQ ID NO: 1195 - DNA, 23 bp, Artificial Sequence
  Description of Artificial Sequence: Synthetic oligonucleotide
  Description of Combined DNA/RNA Molecule: Synthetic oligonucleotide
uacuccaaaacauucagguguau

SEQ ID NO: 1196 - RNA, 23 nt, Artificial Sequence
  Description of Artificial Sequence: Synthetic oligonucleotide
uaggaucuaaaaccacugagggu

SEQ ID NO: 1197 - RNA, 23 nt, Artificial Sequence
  Description of Artificial Sequence: Synthetic oligonucleotide
ucuucaggagaauguauaugcuu

SEQ ID NO: 1198 - RNA, 23 nt, Artificial Sequence
  Description of Artificial Sequence: Synthetic oligonucleotide
uauaagaguucccuuaaguucaa

SEQ ID NO: 1199 - RNA, 23 nt, Artificial Sequence
  Description of Artificial Sequence: Synthetic oligonucleotide
uacucaaguccaagaugcugauc

SEQ ID NO: 1200 - RNA, 23 nt, Artificial Sequence
  Description of Artificial Sequence: Synthetic oligonucleotide
ugggaaaggaucuuaguuccaag

SEQ ID NO: 1201 - DNA, 23 bp, Artificial Sequence
  Description of Artificial Sequence: Synthetic oligonucleotide
  Description of Combined DNA/RNA Molecule: Synthetic oligonucleotide
ugggaaaggaucuuaguuccaag

SEQ ID NO: 1202 - DNA, 23 bp, Artificial Sequence
  Description of Artificial Sequence: Synthetic oligonucleotide
  Description of Combined DNA/RNA Molecule: Synthetic oligonucleotide
ugaccaaaaucccauuggaaaau

SEQ ID NO: 1203 - RNA, 23 nt, Artificial Sequence
  Description of Artificial Sequence: Synthetic oligonucleotide
ucuaccagacaauaagcuucagg

SEQ ID NO: 1204 - DNA, 23 bp, Artificial Sequence
  Description of Artificial Sequence: Synthetic oligonucleotide
  Description of Combined DNA/RNA Molecule: Synthetic oligonucleotide
ucuaccagacaauaagcuucagg

SEQ ID NO: 1205 - DNA, 23 bp, Artificial Sequence
  Description of Artificial Sequence: Synthetic oligonucleotide
  Description of Combined DNA/RNA Molecule: Synthetic oligonucleotide
utuacuaagagaucuccuuccuc

SEQ ID NO: 1206 - DNA, 23 bp, Artificial Sequence
  Description of Artificial Sequence: Synthetic oligonucleotide
  Description of Combined DNA/RNA Molecule: Synthetic oligonucleotide
uuuggutgaucuggauuuacuaa

SEQ ID NO: 1207 - RNA, 23 nt, Artificial Sequence
  Description of Artificial Sequence: Synthetic oligonucleotide
uccuaggagaaacucuggagcuu

SEQ ID NO: 1208 - RNA, 23 nt, Artificial Sequence
  Description of Artificial Sequence: Synthetic oligonucleotide
ugcuguaggguucuagugaggcu

SEQ ID NO: 1209 - RNA, 23 nt, Artificial Sequence
  Description of Artificial Sequence: Synthetic oligonucleotide
ugagguaucucaaaccaucagcu

SEQ ID NO: 1210 - RNA, 23 nt, Artificial Sequence
  Description of Artificial Sequence: Synthetic oligonucleotide
uucgguauauaaucauggcugag

SEQ ID NO: 1211 - DNA, 23 bp, Artificial Sequence
  Description of Artificial Sequence: Synthetic oligonucleotide
  Description of Combined DNA/RNA Molecule: Synthetic oligonucleotide
ucguagtcagcaaucuuugcaau

SEQ ID NO: 1212 - RNA, 23 nt, Artificial Sequence
  Description of Artificial Sequence: Synthetic oligonucleotide
ucgucagacagacuaauucagcu

SEQ ID NO: 1213 - DNA, 23 bp, Artificial Sequence
  Description of Artificial Sequence: Synthetic oligonucleotide
  Description of Combined DNA/RNA Molecule: Synthetic oligonucleotide
uaagaaaugagagcuguccucug

SEQ ID NO: 1214 - DNA, 23 bp, Artificial Sequence
  Description of Artificial Sequence: Synthetic oligonucleotide
  Description of Combined DNA/RNA Molecule: Synthetic oligonucleotide
uuucggtauugaugaccaggaga

SEQ ID NO: 1215 - RNA, 23 nt, Artificial Sequence
  Description of Artificial Sequence: Synthetic oligonucleotide
uggaguacugacauuuccuauau

SEQ ID NO: 1216 - DNA, 23 bp, Artificial Sequence
  Description of Artificial Sequence: Synthetic oligonucleotide
  Description of Combined DNA/RNA Molecule: Synthetic oligonucleotide
uacucaaacacaucaauggagua

SEQ ID NO: 1217 - DNA, 23 bp, Artificial Sequence
  Description of Artificial Sequence: Synthetic oligonucleotide
  Description of Combined DNA/RNA Molecule: Synthetic oligonucleotide
uguggatucacucaaacacauca

SEQ ID NO: 1218 - DNA, 23 bp, Artificial Sequence
  Description of Artificial Sequence: Synthetic oligonucleotide
  Description of Combined DNA/RNA Molecule: Synthetic oligonucleotide
uacagutggcuuguucuugucuc

SEQ ID NO: 1219 - RNA, 23 nt, Artificial Sequence
  Description of Artificial Sequence: Synthetic oligonucleotide
uuauccaaagagcaguguucuuc

SEQ ID NO: 1220 - DNA, 23 bp, Artificial Sequence
  Description of Artificial Sequence: Synthetic oligonucleotide
  Description of Combined DNA/RNA Molecule: Synthetic oligonucleotide
utauccaaagagcaguguucuuc

SEQ ID NO: 1221 - DNA, 23 bp, Artificial Sequence
  Description of Artificial Sequence: Synthetic oligonucleotide
  Description of Combined DNA/RNA Molecule: Synthetic oligonucleotide
utaaautuugcacuucaugugga

SEQ ID NO: 1222 - RNA, 23 nt, Artificial Sequence
  Description of Artificial Sequence: Synthetic oligonucleotide
uuauccaaagacaauuccuauuu

SEQ ID NO: 1223 - DNA, 23 bp, Artificial Sequence
  Description of Artificial Sequence: Synthetic oligonucleotide
  Description of Combined DNA/RNA Molecule: Synthetic oligonucleotide
utauccaaagacaauuccuauuu

SEQ ID NO: 1224 - RNA, 23 nt, Artificial Sequence
  Description of Artificial Sequence: Synthetic oligonucleotide
ugauacaucugcagugugugaag

SEQ ID NO: 1225 - RNA, 23 nt, Artificial Sequence
  Description of Artificial Sequence: Synthetic oligonucleotide
uauaagacuuaaacccagacacu

SEQ ID NO: 1226 - DNA, 23 bp, Artificial Sequence
  Description of Artificial Sequence: Synthetic oligonucleotide
  Description of Combined DNA/RNA Molecule: Synthetic oligonucleotide
ucuaagauugucugaaauccuuu

SEQ ID NO: 1227 - DNA, 23 bp, Artificial Sequence
  Description of Artificial Sequence: Synthetic oligonucleotide
  Description of Combined DNA/RNA Molecule: Synthetic oligonucleotide
uguaauacggcaucucgguaaaa

SEQ ID NO: 1228 - DNA, 23 bp, Artificial Sequence
  Description of Artificial Sequence: Synthetic oligonucleotide
  Description of Combined DNA/RNA Molecule: Synthetic oligonucleotide
ugaucuaaaaccacugagggucc

SEQ ID NO: 1229 - RNA, 23 nt, Artificial Sequence
  Description of Artificial Sequence: Synthetic oligonucleotide
uguuauaugacagguuaaacugu

SEQ ID NO: 1230 - DNA, 23 bp, Artificial Sequence
  Description of Artificial Sequence: Synthetic oligonucleotide
  Description of Combined DNA/RNA Molecule: Synthetic oligonucleotide
uguuauaugacagguuaaacugu

SEQ ID NO: 1231 - DNA, 23 bp, Artificial Sequence
  Description of Artificial Sequence: Synthetic oligonucleotide
  Description of Combined DNA/RNA Molecule: Synthetic oligonucleotide
ugcaagaaaggcauagcagcaag

SEQ ID NO: 1232 - RNA, 23 nt, Artificial Sequence
  Description of Artificial Sequence: Synthetic oligonucleotide
uaggcaagaaaggcauagcagca

SEQ ID NO: 1233 - DNA, 23 bp, Artificial Sequence
  Description of Artificial Sequence: Synthetic oligonucleotide
  Description of Combined DNA/RNA Molecule: Synthetic oligonucleotide
uccgcaaguguggaagauuuaaa

SEQ ID NO: 1234 - DNA, 23 bp, Artificial Sequence
  Description of Artificial Sequence: Synthetic oligonucleotide
  Description of Combined DNA/RNA Molecule: Synthetic oligonucleotide
uaauaagaguucccuuaaguuca

SEQ ID NO: 1235 - RNA, 23 nt, Artificial Sequence
  Description of Artificial Sequence: Synthetic oligonucleotide
ucucaaguccaagaugcugaucu

SEQ ID NO: 1236 - DNA, 23 bp, Artificial Sequence
  Description of Artificial Sequence: Synthetic oligonucleotide
  Description of Combined DNA/RNA Molecule: Synthetic oligonucleotide
ucucaaguccaagaugcugaucu

SEQ ID NO: 1237 - DNA, 23 bp, Artificial Sequence
  Description of Artificial Sequence: Synthetic oligonucleotide
  Description of Combined DNA/RNA Molecule: Synthetic oligonucleotide
ucauaaguuucauucgguuauaa

SEQ ID NO: 1238 - DNA, 23 bp, Artificial Sequence
  Description of Artificial Sequence: Synthetic oligonucleotide
  Description of Combined DNA/RNA Molecule: Synthetic oligonucleotide
ucagaaacauccaaaugugugcc

SEQ ID NO: 1239 - DNA, 23 bp, Artificial Sequence
  Description of Artificial Sequence: Synthetic oligonucleotide
  Description of Combined DNA/RNA Molecule: Synthetic oligonucleotide
uccgaaguuuugccaaagcauca

SEQ ID NO: 1240 - RNA, 23 nt, Artificial Sequence
  Description of Artificial Sequence: Synthetic oligonucleotide
uguucuacauagcagucuggaau

SEQ ID NO: 1241 - DNA, 23 bp, Artificial Sequence
  Description of Artificial Sequence: Synthetic oligonucleotide
  Description of Combined DNA/RNA Molecule: Synthetic oligonucleotide
uaugaagaaggacuccugauuca

SEQ ID NO: 1242 - RNA, 23 nt, Artificial Sequence
  Description of Artificial Sequence: Synthetic oligonucleotide
uaucccauuggaaaauaaggcau

SEQ ID NO: 1243 - DNA, 23 bp, Artificial Sequence
  Description of Artificial Sequence: Synthetic oligonucleotide
  Description of Combined DNA/RNA Molecule: Synthetic oligonucleotide
uaucccauuggaaaauaaggcau

SEQ ID NO: 1244 - DNA, 23 bp, Artificial Sequence
  Description of Artificial Sequence: Synthetic oligonucleotide
  Description of Combined DNA/RNA Molecule: Synthetic oligonucleotide
ucaagaaggaacuguaauuuuua

SEQ ID NO: 1245 - DNA, 23 bp, Artificial Sequence
  Description of Artificial Sequence: Synthetic oligonucleotide
  Description of Combined DNA/RNA Molecule: Synthetic oligonucleotide
uucaagtcaucaaguaagauuuu

SEQ ID NO: 1246 - DNA, 23 bp, Artificial Sequence
  Description of Artificial Sequence: Synthetic oligonucleotide
  Description of Combined DNA/RNA Molecule: Synthetic oligonucleotide
ugagcutguucaaauuccaacuc

SEQ ID NO: 1247 - RNA, 23 nt, Artificial Sequence
  Description of Artificial Sequence: Synthetic oligonucleotide
ucuaggagaaacucuggagcuug

SEQ ID NO: 1248 - RNA, 23 nt, Artificial Sequence
  Description of Artificial Sequence: Synthetic oligonucleotide
uaucaccuaggagaaacucugga

SEQ ID NO: 1249 - RNA, 23 nt, Artificial Sequence
  Description of Artificial Sequence: Synthetic oligonucleotide
ucuguaggguucuagugaggcug

SEQ ID NO: 1250 - DNA, 23 bp, Artificial Sequence
  Description of Artificial Sequence: Synthetic oligonucleotide
  Description of Combined DNA/RNA Molecule: Synthetic oligonucleotide
ucugtaggguucuagugaggcug

SEQ ID NO: 1251 - DNA, 23 bp, Artificial Sequence
  Description of Artificial Sequence: Synthetic oligonucleotide
  Description of Combined DNA/RNA Molecule: Synthetic oligonucleotide
uguauataaucauggcugagugg

SEQ ID NO: 1252 - DNA, 23 bp, Artificial Sequence
  Description of Artificial Sequence: Synthetic oligonucleotide
  Description of Combined DNA/RNA Molecule: Synthetic oligonucleotide
uguatataaucauggcugagugg

SEQ ID NO: 1253 - RNA, 23 nt, Artificial Sequence
  Description of Artificial Sequence: Synthetic oligonucleotide
ugguauauaaucauggcugagug

SEQ ID NO: 1254 - DNA, 23 bp, Artificial Sequence
  Description of Artificial Sequence: Synthetic oligonucleotide
  Description of Combined DNA/RNA Molecule: Synthetic oligonucleotide
ugguauauaaucauggcugagug

SEQ ID NO: 1255 - RNA, 23 nt, Artificial Sequence
  Description of Artificial Sequence: Synthetic oligonucleotide
uacaggaagaugcaccaaggcua

SEQ ID NO: 1256 - DNA, 23 bp, Artificial Sequence
  Description of Artificial Sequence: Synthetic oligonucleotide
  Description of Combined DNA/RNA Molecule: Synthetic oligonucleotide
uacaggaagaugcaccaaggcua

SEQ ID NO: 1257 - RNA, 23 nt, Artificial Sequence
  Description of Artificial Sequence: Synthetic oligonucleotide
uaacaggaagaugcaccaaggcu

SEQ ID NO: 1258 - RNA, 23 nt, Artificial Sequence
  Description of Artificial Sequence: Synthetic oligonucleotide
uuucccaucuucgguauugauga

SEQ ID NO: 1259 - DNA, 23 bp, Artificial Sequence
  Description of Artificial Sequence: Synthetic oligonucleotide
  Description of Combined DNA/RNA Molecule: Synthetic oligonucleotide
uggaautgcaauacaaacaagug

SEQ ID NO: 1260 - DNA, 23 bp, Artificial Sequence
  Description of Artificial Sequence: Synthetic oligonucleotide
  Description of Combined DNA/RNA Molecule: Synthetic oligonucleotide
uggaautgcaatacaaacaagug

SEQ ID NO: 1261 - DNA, 23 bp, Artificial Sequence
  Description of Artificial Sequence: Synthetic oligonucleotide
  Description of Combined DNA/RNA Molecule: Synthetic oligonucleotide
ucucaaacacatcaauggaguac

SEQ ID NO: 1262 - RNA, 23 nt, Artificial Sequence
  Description of Artificial Sequence: Synthetic oligonucleotide
uagcaagauuguaucucuuucug

SEQ ID NO: 1263 - DNA, 23 bp, Artificial Sequence
  Description of Artificial Sequence: Synthetic oligonucleotide
  Description of Combined DNA/RNA Molecule: Synthetic oligonucleotide
uagcaagauugtaucucuuucug

SEQ ID NO: 1264 - RNA, 23 nt, Artificial Sequence
  Description of Artificial Sequence: Synthetic oligonucleotide
ugaucaccauucuugcuagugua

SEQ ID NO: 1265 - RNA, 23 nt, Artificial Sequence
  Description of Artificial Sequence: Synthetic oligonucleotide
uaagaccgcaaguguggaagauu

SEQ ID NO: 1266 - DNA, 23 bp, Artificial Sequence
  Description of Artificial Sequence: Synthetic oligonucleotide
  Description of Combined DNA/RNA Molecule: Synthetic oligonucleotide
uaagaccgcaaguguggaagauu

SEQ ID NO: 1267 - RNA, 23 nt, Artificial Sequence
  Description of Artificial Sequence: Synthetic oligonucleotide
uaaagaccgcaaguguggaagau

SEQ ID NO: 1268 - DNA, 23 bp, Artificial Sequence
  Description of Artificial Sequence: Synthetic oligonucleotide
  Description of Combined DNA/RNA Molecule: Synthetic oligonucleotide
ucucauaucuaaagaccgcaagu

SEQ ID NO: 1269 - RNA, 23 nt, Artificial Sequence
  Description of Artificial Sequence: Synthetic oligonucleotide
ugucauagacagcaagguacaau

SEQ ID NO: 1270 - RNA, 23 nt, Artificial Sequence
  Description of Artificial Sequence: Synthetic oligonucleotide
uagugaacugcgugaggaagcuc

SEQ ID NO: 1271 - RNA, 23 nt, Artificial Sequence
  Description of Artificial Sequence: Synthetic oligonucleotide
uacaaccuuccacuuucacuguc

SEQ ID NO: 1272 - DNA, 23 bp, Artificial Sequence
  Description of Artificial Sequence: Synthetic oligonucleotide
  Description of Combined DNA/RNA Molecule: Synthetic oligonucleotide
uacaaccuuccacuuucacuguc

SEQ ID NO: 1273 - DNA, 23 bp, Artificial Sequence
  Description of Artificial Sequence: Synthetic oligonucleotide
  Description of Combined DNA/RNA Molecule: Synthetic oligonucleotide
uacugatccaaaacugccaucac

SEQ ID NO: 1274 - RNA, 23 nt, Artificial Sequence
  Description of Artificial Sequence: Synthetic oligonucleotide
ugcauugggauacagugugaaaa

SEQ ID NO: 1275 - DNA, 23 bp, Artificial Sequence
  Description of Artificial Sequence: Synthetic oligonucleotide
  Description of Combined DNA/RNA Molecule: Synthetic oligonucleotide
ucagcaaucuutgcaaugauggc

SEQ ID NO: 1276 - DNA, 23 bp, Artificial Sequence
  Description of Artificial Sequence: Synthetic oligonucleotide
  Description of Combined DNA/RNA Molecule: Synthetic oligonucleotide
ucauuctacagcaguacugagca

SEQ ID NO: 1277 - RNA, 23 nt, Artificial Sequence
  Description of Artificial Sequence: Synthetic oligonucleotide
ucucgucagacagacuaauucag

SEQ ID NO: 1278 - DNA, 23 bp, Artificial Sequence
  Description of Artificial Sequence: Synthetic oligonucleotide
  Description of Combined DNA/RNA Molecule: Synthetic oligonucleotide
ucucgucagacagacuaauucag

SEQ ID NO: 1279 - RNA, 23 nt, Artificial Sequence
  Description of Artificial Sequence: Synthetic oligonucleotide
ucuaagcacaauauucuacuauc

SEQ ID NO: 1280 - RNA, 23 nt, Artificial Sequence
  Description of Artificial Sequence: Synthetic oligonucleotide
uagaguaccagacugugucccag

SEQ ID NO: 1281 - RNA, 23 nt, Artificial Sequence
  Description of Artificial Sequence: Synthetic oligonucleotide
ucaggagaguaccagacuguguc

SEQ ID NO: 1282 - DNA, 23 bp, Artificial Sequence
  Description of Artificial Sequence: Synthetic oligonucleotide
  Description of Combined DNA/RNA Molecule: Synthetic oligonucleotide
ucaggagaguaccagacuguguc

SEQ ID NO: 1283 - DNA, 23 bp, Artificial Sequence
  Description of Artificial Sequence: Synthetic oligonucleotide
  Description of Combined DNA/RNA Molecule: Synthetic oligonucleotide
uccauctucgguauugaugacca

SEQ ID NO: 1284 - DNA, 23 bp, Artificial Sequence
  Description of Artificial Sequence: Synthetic oligonucleotide
  Description of Combined DNA/RNA Molecule: Synthetic oligonucleotide
uccatctucggtauugaugacca

SEQ ID NO: 1285 - RNA, 23 nt, Artificial Sequence
  Description of Artificial Sequence: Synthetic oligonucleotide
uaggguaugucucuuuuucccau

SEQ ID NO: 1286 - RNA, 23 nt, Artificial Sequence
  Description of Artificial Sequence: Synthetic oligonucleotide
uuuucuaggguaugucucuuuuu

SEQ ID NO: 1287 - DNA, 23 bp, Artificial Sequence
  Description of Artificial Sequence: Synthetic oligonucleotide
  Description of Combined DNA/RNA Molecule: Synthetic oligonucleotide
ugacautuccuauauuuaguauc

SEQ ID NO: 1288 - DNA, 23 bp, Artificial Sequence
  Description of Artificial Sequence: Synthetic oligonucleotide
  Description of Combined DNA/RNA Molecule: Synthetic oligonucleotide
ugacautuccuauauuuaguauc

SEQ ID NO: 1289 - DNA, 23 bp, Artificial Sequence
  Description of Artificial Sequence: Synthetic oligonucleotide
  Description of Combined DNA/RNA Molecule: Synthetic oligonucleotide
uuggautcacucaaacacaucaa

SEQ ID NO: 1290 - DNA, 23 bp, Artificial Sequence
  Description of Artificial Sequence: Synthetic oligonucleotide
  Description of Combined DNA/RNA Molecule: Synthetic oligonucleotide
ucuaaatuuugcacuucaugugg

SEQ ID NO: 1291 - DNA, 23 bp, Artificial Sequence
  Description of Artificial Sequence: Synthetic oligonucleotide
  Description of Combined DNA/RNA Molecule: Synthetic oligonucleotide
ucagcuaauuctuuucucacuuc

SEQ ID NO: 1292 - RNA, 23 nt, Artificial Sequence
  Description of Artificial Sequence: Synthetic oligonucleotide
uggcauagcagcaagaaaauuca

SEQ ID NO: 1293 - RNA, 23 nt, Artificial Sequence
  Description of Artificial Sequence: Synthetic oligonucleotide
ucuuggaaccagcaaauauucuu

SEQ ID NO: 1294 - DNA, 23 bp, Artificial Sequence
  Description of Artificial Sequence: Synthetic oligonucleotide
  Description of Combined DNA/RNA Molecule: Synthetic oligonucleotide
uaccaaaaucccauuggaaaaua

SEQ ID NO: 1295 - RNA, 23 nt, Artificial Sequence
  Description of Artificial Sequence: Synthetic oligonucleotide
uaauaucaaucuccagcaaccca

SEQ ID NO: 1296 - RNA, 23 nt, Artificial Sequence
  Description of Artificial Sequence: Synthetic oligonucleotide
uucaacagaguuucuccuucacc

SEQ ID NO: 1297 - RNA, 23 nt, Artificial Sequence
  Description of Artificial Sequence: Synthetic oligonucleotide
ucugauccaaaacugccaucacc

SEQ ID NO: 1298 - DNA, 23 bp, Artificial Sequence
  Description of Artificial Sequence: Synthetic oligonucleotide
  Description of Combined DNA/RNA Molecule: Synthetic oligonucleotide
ucugauccaaaacugccaucacc

SEQ ID NO: 1299 - RNA, 23 nt, Artificial Sequence
  Description of Artificial Sequence: Synthetic oligonucleotide
uccguagucagcaaucuuugcaa

SEQ ID NO: 1300 - DNA, 23 bp, Artificial Sequence
  Description of Artificial Sequence: Synthetic oligonucleotide
  Description of Combined DNA/RNA Molecule: Synthetic oligonucleotide
uccgtagucagcaaucuuugcaa

SEQ ID NO: 1301 - RNA, 23 nt, Artificial Sequence
  Description of Artificial Sequence: Synthetic oligonucleotide
uaccaggagaguaccagacugug

SEQ ID NO: 1302 - RNA, 23 nt, Artificial Sequence
  Description of Artificial Sequence: Synthetic oligonucleotide
uucgguauugaugaccaggagag

SEQ ID NO: 1303 - DNA, 23 bp, Artificial Sequence
  Description of Artificial Sequence: Synthetic oligonucleotide
  Description of Combined DNA/RNA Molecule: Synthetic oligonucleotide
utcgguauugatgaccaggagag

SEQ ID NO: 1304 - RNA, 23 nt, Artificial Sequence
  Description of Artificial Sequence: Synthetic oligonucleotide
ucuucgguauugaugaccaggag

SEQ ID NO: 1305 - DNA, 23 bp, Artificial Sequence
  Description of Artificial Sequence: Synthetic oligonucleotide
  Description of Combined DNA/RNA Molecule: Synthetic oligonucleotide
ucuucgguauugaugaccaggag

SEQ ID NO: 1306 - RNA, 23 nt, Artificial Sequence
  Description of Artificial Sequence: Synthetic oligonucleotide
uucuucgguauugaugaccagga

SEQ ID NO: 1307 - DNA, 23 bp, Artificial Sequence
  Description of Artificial Sequence: Synthetic oligonucleotide
  Description of Combined DNA/RNA Molecule: Synthetic oligonucleotide
ucuuuutcccaucuucgguauug

SEQ ID NO: 1308 - DNA, 23 bp, Artificial Sequence
  Description of Artificial Sequence: Synthetic oligonucleotide
  Description of Combined DNA/RNA Molecule: Synthetic oligonucleotide
ucuututcccatcuucgguauug

SEQ ID NO: 1309 - DNA, 23 bp, Artificial Sequence
  Description of Artificial Sequence: Synthetic oligonucleotide
  Description of Combined DNA/RNA Molecule: Synthetic oligonucleotide
uccagutccuauccaaagagcag

SEQ ID NO: 1310 - DNA, 23 bp, Artificial Sequence
  Description of Artificial Sequence: Synthetic oligonucleotide
  Description of Combined DNA/RNA Molecule: Synthetic oligonucleotide
uccagutccuatccaaagagcag

SEQ ID NO: 1311 - RNA, 23 nt, Artificial Sequence
  Description of Artificial Sequence: Synthetic oligonucleotide
uggaaacugucuuaauauuuuca

SEQ ID NO: 1312 - DNA, 23 bp, Artificial Sequence
  Description of Artificial Sequence: Synthetic oligonucleotide
  Description of Combined DNA/RNA Molecule: Synthetic oligonucleotide
uggaaacuguctuaauauuuuca

SEQ ID NO: 1313 - DNA, 23 bp, Artificial Sequence
  Description of Artificial Sequence: Synthetic oligonucleotide
  Description of Combined DNA/RNA Molecule: Synthetic oligonucleotide
ucugauaucugaucaccauucuu

SEQ ID NO: 1314 - RNA, 23 nt, Artificial Sequence
  Description of Artificial Sequence: Synthetic oligonucleotide
ucaucucgguaaaauucuccuac

SEQ ID NO: 1315 - RNA, 23 nt, Artificial Sequence
  Description of Artificial Sequence: Synthetic oligonucleotide
uaauacggcaucucgguaaaauu

SEQ ID NO: 1316 - DNA, 23 bp, Artificial Sequence
  Description of Artificial Sequence: Synthetic oligonucleotide
  Description of Combined DNA/RNA Molecule: Synthetic oligonucleotide
uaauacggcaucucgguaaaauu

SEQ ID NO: 1317 - RNA, 23 nt, Artificial Sequence
  Description of Artificial Sequence: Synthetic oligonucleotide
uaagcucgugagugcauucuggu

SEQ ID NO: 1318 - RNA, 23 nt, Artificial Sequence
  Description of Artificial Sequence: Synthetic oligonucleotide
ugacaagccucaagaaaguucuc

SEQ ID NO: 1319 - RNA, 23 nt, Artificial Sequence
  Description of Artificial Sequence: Synthetic oligonucleotide
ugaccgcaaguguggaagauuua

SEQ ID NO: 1320 - DNA, 23 bp, Artificial Sequence
  Description of Artificial Sequence: Synthetic oligonucleotide
  Description of Combined DNA/RNA Molecule: Synthetic oligonucleotide
ugaccgcaaguguggaagauuua

SEQ ID NO: 1321 - DNA, 23 bp, Artificial Sequence
  Description of Artificial Sequence: Synthetic oligonucleotide
  Description of Combined DNA/RNA Molecule: Synthetic oligonucleotide
uaagaagaagcgcgagccuuuau

SEQ ID NO: 1322 - DNA, 23 bp, Artificial Sequence
  Description of Artificial Sequence: Synthetic oligonucleotide
  Description of Combined DNA/RNA Molecule: Synthetic oligonucleotide
ucaaaugugugccaacgagaauc

SEQ ID NO: 1323 - DNA, 23 bp, Artificial Sequence
  Description of Artificial Sequence: Synthetic oligonucleotide
  Description of Combined DNA/RNA Molecule: Synthetic oligonucleotide
ucauauagucggaugauaauuuc

SEQ ID NO: 1324 - RNA, 23 nt, Artificial Sequence
  Description of Artificial Sequence: Synthetic oligonucleotide
ucaggagaccaauuuaaguaaau

SEQ ID NO: 1325 - RNA, 23 nt, Artificial Sequence
  Description of Artificial Sequence: Synthetic oligonucleotide
ucagauccuaccagacaauaagc

SEQ ID NO: 1326 - DNA, 23 bp, Artificial Sequence
  Description of Artificial Sequence: Synthetic oligonucleotide
  Description of Combined DNA/RNA Molecule: Synthetic oligonucleotide
ucagauccuaccagacaauaagc

SEQ ID NO: 1327 - DNA, 23 bp, Artificial Sequence
  Description of Artificial Sequence: Synthetic oligonucleotide
  Description of Combined DNA/RNA Molecule: Synthetic oligonucleotide
uagaauacagccuuuucuacaag

SEQ ID NO: 1328 - DNA, 23 bp, Artificial Sequence
  Description of Artificial Sequence: Synthetic oligonucleotide
  Description of Combined DNA/RNA Molecule: Synthetic oligonucleotide
ugagaatcaaugugguccacaac

SEQ ID NO: 1329 - DNA, 23 bp, Artificial Sequence
  Description of Artificial Sequence: Synthetic oligonucleotide
  Description of Combined DNA/RNA Molecule: Synthetic oligonucleotide
ugagaatcaaugugguccacaac

SEQ ID NO: 1330 - RNA, 23 nt, Artificial Sequence
  Description of Artificial Sequence: Synthetic oligonucleotide
uauaucaaucuccagcaacccag

SEQ ID NO: 1331 - DNA, 23 bp, Artificial Sequence
  Description of Artificial Sequence: Synthetic oligonucleotide
  Description of Combined DNA/RNA Molecule: Synthetic oligonucleotide
uuaauatuucuaggcaggucagc

SEQ ID NO: 1332 - RNA, 23 nt, Artificial Sequence
  Description of Artificial Sequence: Synthetic oligonucleotide
ugcagcauugggauacaguguga

SEQ ID NO: 1333 - RNA, 23 nt, Artificial Sequence
  Description of Artificial Sequence: Synthetic oligonucleotide
uaugccguagucagcaaucuuug

SEQ ID NO: 1334 - DNA, 23 bp, Artificial Sequence
  Description of Artificial Sequence: Synthetic oligonucleotide
  Description of Combined DNA/RNA Molecule: Synthetic oligonucleotide
uaugccguagucagcaaucuuug

SEQ ID NO: 1335 - DNA, 23 bp, Artificial Sequence
  Description of Artificial Sequence: Synthetic oligonucleotide
  Description of Combined DNA/RNA Molecule: Synthetic oligonucleotide
ucuacuauucuaccuccaguugu

SEQ ID NO: 1336 - RNA, 23 nt, Artificial Sequence
  Description of Artificial Sequence: Synthetic oligonucleotide
uggaaacuucaaacccucuacua

SEQ ID NO: 1337 - RNA, 23 nt, Artificial Sequence
  Description of Artificial Sequence: Synthetic oligonucleotide
ugcuaagcacaauauucuacuau

SEQ ID NO: 1338 - RNA, 23 nt, Artificial Sequence
  Description of Artificial Sequence: Synthetic oligonucleotide
ugaguaccagacugugucccaga

SEQ ID NO: 1339 - DNA, 23 bp, Artificial Sequence
  Description of Artificial Sequence: Synthetic oligonucleotide
  Description of Combined DNA/RNA Molecule: Synthetic oligonucleotide
ugagtaccagacugugucccaga

SEQ ID NO: 1340 - DNA, 23 bp, Artificial Sequence
  Description of Artificial Sequence: Synthetic oligonucleotide
  Description of Combined DNA/RNA Molecule: Synthetic oligonucleotide
ucggtatugaugaccaggagagu

SEQ ID NO: 1341 - RNA, 23 nt, Artificial Sequence
  Description of Artificial Sequence: Synthetic oligonucleotide
uucccagaauaagacauuuugug

SEQ ID NO: 1342 - RNA, 23 nt, Artificial Sequence
  Description of Artificial Sequence: Synthetic oligonucleotide
uguggaaagcucgugagugcauu

SEQ ID NO: 1343 - DNA, 23 bp, Artificial Sequence
  Description of Artificial Sequence: Synthetic oligonucleotide
  Description of Combined DNA/RNA Molecule: Synthetic oligonucleotide
uguggaaagcucgugagugcauu

SEQ ID NO: 1344 - RNA, 23 nt, Artificial Sequence
  Description of Artificial Sequence: Synthetic oligonucleotide
uaauaucauugcugcucauaucu

SEQ ID NO: 1345 - DNA, 23 bp, Artificial Sequence
  Description of Artificial Sequence: Synthetic oligonucleotide
  Description of Combined DNA/RNA Molecule: Synthetic oligonucleotide
ucuugaaauuaaggcucucguuu

SEQ ID NO: 1346 - RNA, 23 nt, Artificial Sequence
  Description of Artificial Sequence: Synthetic oligonucleotide
uacugcgugaggaagcucauuuu

SEQ ID NO: 1347 - RNA, 23 nt, Artificial Sequence
  Description of Artificial Sequence: Synthetic oligonucleotide
ugacaaccuuccacuuucacugu

SEQ ID NO: 1348 - DNA, 23 bp, Artificial Sequence
  Description of Artificial Sequence: Synthetic oligonucleotide
  Description of Combined DNA/RNA Molecule: Synthetic oligonucleotide
ugacaaccuuccacuuucacugu

SEQ ID NO: 1349 - DNA, 23 bp, Artificial Sequence
  Description of Artificial Sequence: Synthetic oligonucleotide
  Description of Combined DNA/RNA Molecule: Synthetic oligonucleotide
uccaauacauucuguuugggcga

SEQ ID NO: 1350 - RNA, 23 nt, Artificial Sequence
  Description of Artificial Sequence: Synthetic oligonucleotide
uaccagacaauaagcuucaggag

SEQ ID NO: 1351 - RNA, 23 nt, Artificial Sequence
  Description of Artificial Sequence: Synthetic oligonucleotide
uccuaccagacaauaagcuucag

SEQ ID NO: 1352 - DNA, 23 bp, Artificial Sequence
  Description of Artificial Sequence: Synthetic oligonucleotide
  Description of Combined DNA/RNA Molecule: Synthetic oligonucleotide
uccuaccagacaauaagcuucag

SEQ ID NO: 1353 - DNA, 23 bp, Artificial Sequence
  Description of Artificial Sequence: Synthetic oligonucleotide
  Description of Combined DNA/RNA Molecule: Synthetic oligonucleotide
uauaauauuuctaggcaggucag

SEQ ID NO: 1354 - RNA, 23 nt, Artificial Sequence
  Description of Artificial Sequence: Synthetic oligonucleotide
uauccaaggaacccuuggaggcu

SEQ ID NO: 1355 - DNA, 23 bp, Artificial Sequence
  Description of Artificial Sequence: Synthetic oligonucleotide
  Description of Combined DNA/RNA Molecule: Synthetic oligonucleotide
uauccaaggaacccuuggaggcu

SEQ ID NO: 1356 - DNA, 23 bp, Artificial Sequence
  Description of Artificial Sequence: Synthetic oligonucleotide
  Description of Combined DNA/RNA Molecule: Synthetic oligonucleotide
ugugaaaagcagcacauuguggg

SEQ ID NO: 1357 - RNA, 23 nt, Artificial Sequence
  Description of Artificial Sequence: Synthetic oligonucleotide
uacccucuacuauucuaccucca

SEQ ID NO: 1358 - DNA, 23 bp, Artificial Sequence
  Description of Artificial Sequence: Synthetic oligonucleotide
  Description of Combined DNA/RNA Molecule: Synthetic oligonucleotide
ucaaccauauucuuuaacuggau

SEQ ID NO: 1359 - RNA, 23 nt, Artificial Sequence
  Description of Artificial Sequence: Synthetic oligonucleotide
uaggaagaugcaccaaggcuaag

SEQ ID NO: 1360 - DNA, 23 bp, Artificial Sequence
  Description of Artificial Sequence: Synthetic oligonucleotide
  Description of Combined DNA/RNA Molecule: Synthetic oligonucleotide
uaggaagaugcaccaaggcuaag

SEQ ID NO: 1361 - RNA, 23 nt, Artificial Sequence
  Description of Artificial Sequence: Synthetic oligonucleotide
ugaccaggagaguaccagacugu

SEQ ID NO: 1362 - DNA, 23 bp, Artificial Sequence
  Description of Artificial Sequence: Synthetic oligonucleotide
  Description of Combined DNA/RNA Molecule: Synthetic oligonucleotide
uucccatcuucgguauugaugac

SEQ ID NO: 1363 - DNA, 23 bp, Artificial Sequence
  Description of Artificial Sequence: Synthetic oligonucleotide
  Description of Combined DNA/RNA Molecule: Synthetic oligonucleotide
uagcggtuccaaccaaaagaaaa

SEQ ID NO: 1364 - RNA, 23 nt, Artificial Sequence
  Description of Artificial Sequence: Synthetic oligonucleotide
uaucccacacuuccacaacaggg

SEQ ID NO: 1365 - RNA, 23 nt, Artificial Sequence
  Description of Artificial Sequence: Synthetic oligonucleotide
ucaguuccuauccaaagagcagu

SEQ ID NO: 1366 - DNA, 23 bp, Artificial Sequence
  Description of Artificial Sequence: Synthetic oligonucleotide
  Description of Combined DNA/RNA Molecule: Synthetic oligonucleotide
ucagtuccuauccaaagagcagu

SEQ ID NO: 1367 - DNA, 23 bp, Artificial Sequence
  Description of Artificial Sequence: Synthetic oligonucleotide
  Description of Combined DNA/RNA Molecule: Synthetic oligonucleotide
ucaucatgacucugaccgaauua

SEQ ID NO: 1368 - DNA, 23 bp, Artificial Sequence
  Description of Artificial Sequence: Synthetic oligonucleotide
  Description of Combined DNA/RNA Molecule: Synthetic oligonucleotide
ucaucatgacucugaccgaauua

SEQ ID NO: 1369 - DNA, 23 bp, Artificial Sequence
  Description of Artificial Sequence: Synthetic oligonucleotide
  Description of Combined DNA/RNA Molecule: Synthetic oligonucleotide
ucggcctuauaaauuuuaguaug

SEQ ID NO: 1370 - RNA, 23 nt, Artificial Sequence
  Description of Artificial Sequence: Synthetic oligonucleotide
uaucggccuuauaaauuuuagua

SEQ ID NO: 1371 - RNA, 23 nt, Artificial Sequence
  Description of Artificial Sequence: Synthetic oligonucleotide
uggcaaaugcuauuguuggccac

SEQ ID NO: 1372 - DNA, 23 bp, Artificial Sequence
  Description of Artificial Sequence: Synthetic oligonucleotide
  Description of Combined DNA/RNA Molecule: Synthetic oligonucleotide
uggcaaaugcuauuguuggccac

SEQ ID NO: 1373 - RNA, 23 nt, Artificial Sequence
  Description of Artificial Sequence: Synthetic oligonucleotide
uacccucgcuuauucaggaguuc

SEQ ID NO: 1374 - RNA, 23 nt, Artificial Sequence
  Description of Artificial Sequence: Synthetic oligonucleotide
ucuucaggagaccaauuuaagua

SEQ ID NO: 1375 - RNA, 23 nt, Artificial Sequence
  Description of Artificial Sequence: Synthetic oligonucleotide
uauccuaccagacaauaagcuuc

SEQ ID NO: 1376 - DNA, 23 bp, Artificial Sequence
  Description of Artificial Sequence: Synthetic oligonucleotide
  Description of Combined DNA/RNA Molecule: Synthetic oligonucleotide
uauccuaccagacaauaagcuuc

SEQ ID NO: 1377 - DNA, 23 bp, Artificial Sequence
  Description of Artificial Sequence: Synthetic oligonucleotide
  Description of Combined DNA/RNA Molecule: Synthetic oligonucleotide
uuauaatgcccauuucuucaaca

SEQ ID NO: 1378 - DNA, 23 bp, Artificial Sequence
  Description of Artificial Sequence: Synthetic oligonucleotide
  Description of Combined DNA/RNA Molecule: Synthetic oligonucleotide
utauaatgcccauuucuucaaca

SEQ ID NO: 1379 - RNA, 23 nt, Artificial Sequence
  Description of Artificial Sequence: Synthetic oligonucleotide
uaagagaucuccuuccucugcuu

SEQ ID NO: 1380 - DNA, 23 bp, Artificial Sequence
  Description of Artificial Sequence: Synthetic oligonucleotide
  Description of Combined DNA/RNA Molecule: Synthetic oligonucleotide
uagccutgguugaucuggauuua

SEQ ID NO: 1381 - DNA, 23 bp, Artificial Sequence
  Description of Artificial Sequence: Synthetic oligonucleotide
  Description of Combined DNA/RNA Molecule: Synthetic oligonucleotide
uagccutgguugaucuggauuua

SEQ ID NO: 1382 - DNA, 23 bp, Artificial Sequence
  Description of Artificial Sequence: Synthetic oligonucleotide
  Description of Combined DNA/RNA Molecule: Synthetic oligonucleotide
ugagcctugguugaucuggauuu

SEQ ID NO: 1383 - RNA, 23 nt, Artificial Sequence
  Description of Artificial Sequence: Synthetic oligonucleotide
ucaucaccuaggagaaacucugg

SEQ ID NO: 1384 - DNA, 23 bp, Artificial Sequence
  Description of Artificial Sequence: Synthetic oligonucleotide
  Description of Combined DNA/RNA Molecule: Synthetic oligonucleotide
ucaucaccuaggagaaacucugg

SEQ ID NO: 1385 - RNA, 23 nt, Artificial Sequence
  Description of Artificial Sequence: Synthetic oligonucleotide
uccaaggcuaagcacaauauucu

SEQ ID NO: 1386 - RNA, 23 nt, Artificial Sequence
  Description of Artificial Sequence: Synthetic oligonucleotide
uaccaaggcuaagcacaauauuc

SEQ ID NO: 1387 - DNA, 23 bp, Artificial Sequence
  Description of Artificial Sequence: Synthetic oligonucleotide
  Description of Combined DNA/RNA Molecule: Synthetic oligonucleotide
uaccaaggcuaagcacaauauuc

SEQ ID NO: 1388 - RNA, 23 nt, Artificial Sequence
  Description of Artificial Sequence: Synthetic oligonucleotide
ucgguuccaaccaaaagaaaauu

SEQ ID NO: 1389 - RNA, 23 nt, Artificial Sequence
  Description of Artificial Sequence: Synthetic oligonucleotide
uucagcgguuccaaccaaaagaa

SEQ ID NO: 1390 - DNA, 23 bp, Artificial Sequence
  Description of Artificial Sequence: Synthetic oligonucleotide
  Description of Combined DNA/RNA Molecule: Synthetic oligonucleotide
uacacutccacaacagggcuauu

SEQ ID NO: 1391 - DNA, 23 bp, Artificial Sequence
  Description of Artificial Sequence: Synthetic oligonucleotide
  Description of Combined DNA/RNA Molecule: Synthetic oligonucleotide
uacacutccacaacagggcuauu

SEQ ID NO: 1392 - DNA, 23 bp, Artificial Sequence
  Description of Artificial Sequence: Synthetic oligonucleotide
  Description of Combined DNA/RNA Molecule: Synthetic oligonucleotide
uccuauccaaagacaauuccuau

SEQ ID NO: 1393 - DNA, 23 bp, Artificial Sequence
  Description of Artificial Sequence: Synthetic oligonucleotide
  Description of Combined DNA/RNA Molecule: Synthetic oligonucleotide
ucaacutggcccaaaagaauaca

SEQ ID NO: 1394 - RNA, 23 nt, Artificial Sequence
  Description of Artificial Sequence: Synthetic oligonucleotide
ugcuaacuccaucaccaacaucc

SEQ ID NO: 1395 - DNA, 23 bp, Artificial Sequence
  Description of Artificial Sequence: Synthetic oligonucleotide
  Description of Combined DNA/RNA Molecule: Synthetic oligonucleotide
ugcuaacuccatcaccaacaucc

SEQ ID NO: 1396 - RNA, 23 nt, Artificial Sequence
  Description of Artificial Sequence: Synthetic oligonucleotide
ugcaaugccguagucagcaaucu

SEQ ID NO: 1397 - RNA, 23 nt, Artificial Sequence
  Description of Artificial Sequence: Synthetic oligonucleotide
uggaccaguuugugaauaucauu

SEQ ID NO: 1398 - DNA, 23 bp, Artificial Sequence
  Description of Artificial Sequence: Synthetic oligonucleotide
  Description of Combined DNA/RNA Molecule: Synthetic oligonucleotide
ugcggutccaaccaaaagaaaau

SEQ ID NO: 1399 - RNA, 23 nt, Artificial Sequence
  Description of Artificial Sequence: Synthetic oligonucleotide
uauaccagcaugacauuuuuaag

SEQ ID NO: 1400 - DNA, 23 bp, Artificial Sequence
  Description of Artificial Sequence: Synthetic oligonucleotide
  Description of Combined DNA/RNA Molecule: Synthetic oligonucleotide
ucaataccagcaugacauuuuua

SEQ ID NO: 1401 - DNA, 23 bp, Artificial Sequence
  Description of Artificial Sequence: Synthetic oligonucleotide
  Description of Combined DNA/RNA Molecule: Synthetic oligonucleotide
ugggaaacugucuuaauauuuuc

SEQ ID NO: 1402 - DNA, 23 bp, Artificial Sequence
  Description of Artificial Sequence: Synthetic oligonucleotide
  Description of Combined DNA/RNA Molecule: Synthetic oligonucleotide
ucacacgcucucucuagcaucac

SEQ ID NO: 1403 - DNA, 23 bp, Artificial Sequence
  Description of Artificial Sequence: Synthetic oligonucleotide
  Description of Combined DNA/RNA Molecule: Synthetic oligonucleotide
uaagcgcgagccuuuauauugaa

SEQ ID NO: 1404 - RNA, 23 nt, Artificial Sequence
  Description of Artificial Sequence: Synthetic oligonucleotide
ugaagaagcgcgagccuuuauau

SEQ ID NO: 1405 - DNA, 23 bp, Artificial Sequence
  Description of Artificial Sequence: Synthetic oligonucleotide
  Description of Combined DNA/RNA Molecule: Synthetic oligonucleotide
ugaagaagcgcgagccuuuauau

SEQ ID NO: 1406 - RNA, 23 nt, Artificial Sequence
  Description of Artificial Sequence: Synthetic oligonucleotide
uggacaaccuuccacuuucacug

SEQ ID NO: 1407 - DNA, 23 bp, Artificial Sequence
  Description of Artificial Sequence: Synthetic oligonucleotide
  Description of Combined DNA/RNA Molecule: Synthetic oligonucleotide
uggacaaccuuccacuuucacug

SEQ ID NO: 1408 - RNA, 23 nt, Artificial Sequence
  Description of Artificial Sequence: Synthetic oligonucleotide
ugucgccaauacauucuguuugg

SEQ ID NO: 1409 - RNA, 23 nt, Artificial Sequence
  Description of Artificial Sequence: Synthetic oligonucleotide
uccaucaccuaggagaaacucug

SEQ ID NO: 1410 - DNA, 23 bp, Artificial Sequence
  Description of Artificial Sequence: Synthetic oligonucleotide
  Description of Combined DNA/RNA Molecule: Synthetic oligonucleotide
uccatcaccuaggagaaacucug

SEQ ID NO: 1411 - DNA, 23 bp, Artificial Sequence
  Description of Artificial Sequence: Synthetic oligonucleotide
  Description of Combined DNA/RNA Molecule: Synthetic oligonucleotide
ucuaactccaucaccaacauccg

SEQ ID NO: 1412 - DNA, 23 bp, Artificial Sequence
  Description of Artificial Sequence: Synthetic oligonucleotide
  Description of Combined DNA/RNA Molecule: Synthetic oligonucleotide
ucuaactccaucaccaacauccg

SEQ ID NO: 1413 - RNA, 23 nt, Artificial Sequence
  Description of Artificial Sequence: Synthetic oligonucleotide
ugagcaaugccguagucagcaau

SEQ ID NO: 1414 - RNA, 23 nt, Artificial Sequence
  Description of Artificial Sequence: Synthetic oligonucleotide
ucugcuaggaccaguuugugaau

SEQ ID NO: 1415 - DNA, 23 bp, Artificial Sequence
  Description of Artificial Sequence: Synthetic oligonucleotide
  Description of Combined DNA/RNA Molecule: Synthetic oligonucleotide
ucugcuaggaccaguuugugaau

SEQ ID NO: 1416 - RNA, 23 nt, Artificial Sequence
  Description of Artificial Sequence: Synthetic oligonucleotide
uaagaugcaccaaggcuaagcac

SEQ ID NO: 1417 - DNA, 23 bp, Artificial Sequence
  Description of Artificial Sequence: Synthetic oligonucleotide
  Description of Combined DNA/RNA Molecule: Synthetic oligonucleotide
ugguautgaugaccaggagagua

SEQ ID NO: 1418 - DNA, 23 bp, Artificial Sequence
  Description of Artificial Sequence: Synthetic oligonucleotide
  Description of Combined DNA/RNA Molecule: Synthetic oligonucleotide
ugguautgaugaccaggagagua

SEQ ID NO: 1419 - DNA, 23 bp, Artificial Sequence
  Description of Artificial Sequence: Synthetic oligonucleotide
  Description of Combined DNA/RNA Molecule: Synthetic oligonucleotide
uggguatgucucuuuuucccauc

SEQ ID NO: 1420 - RNA, 23 nt, Artificial Sequence
  Description of Artificial Sequence: Synthetic oligonucleotide
uaccucccuuaaaaagugcacgc

SEQ ID NO: 1421 - RNA, 23 nt, Artificial Sequence
  Description of Artificial Sequence: Synthetic oligonucleotide
ugcccaauaccagcaugacauuu

SEQ ID NO: 1422 - DNA, 23 bp, Artificial Sequence
  Description of Artificial Sequence: Synthetic oligonucleotide
  Description of Combined DNA/RNA Molecule: Synthetic oligonucleotide
ugcccaauaccagcaugacauuu

SEQ ID NO: 1423 - RNA, 23 nt, Artificial Sequence
  Description of Artificial Sequence: Synthetic oligonucleotide
uaagaagcgcgagccuuuauauu

SEQ ID NO: 1424 - RNA, 23 nt, Artificial Sequence
  Description of Artificial Sequence: Synthetic oligonucleotide
uaagccacuuggguuccacaaag

SEQ ID NO: 1425 - DNA, 23 bp, Artificial Sequence
  Description of Artificial Sequence: Synthetic oligonucleotide
  Description of Combined DNA/RNA Molecule: Synthetic oligonucleotide
uaucaatguggtccacaacuugg

SEQ ID NO: 1426 - RNA, 23 nt, Artificial Sequence
  Description of Artificial Sequence: Synthetic oligonucleotide
uauuggaauggugagccuugguu

SEQ ID NO: 1427 - RNA, 23 nt, Artificial Sequence
  Description of Artificial Sequence: Synthetic oligonucleotide
uaaggaacccuuggaggcuaacu

SEQ ID NO: 1428 - DNA, 23 bp, Artificial Sequence
  Description of Artificial Sequence: Synthetic oligonucleotide
  Description of Combined DNA/RNA Molecule: Synthetic oligonucleotide
uugccgtagucagcaaucuuugc

SEQ ID NO: 1429 - DNA, 23 bp, Artificial Sequence
  Description of Artificial Sequence: Synthetic oligonucleotide
  Description of Combined DNA/RNA Molecule: Synthetic oligonucleotide
utgccgtagucagcaaucuuugc

SEQ ID NO: 1430 - RNA, 23 nt, Artificial Sequence
  Description of Artificial Sequence: Synthetic oligonucleotide
ucccaucuucgguauugaugacc

SEQ ID NO: 1431 - DNA, 23 bp, Artificial Sequence
  Description of Artificial Sequence: Synthetic oligonucleotide
  Description of Combined DNA/RNA Molecule: Synthetic oligonucleotide
ucccaucuucgguauugaugacc

SEQ ID NO: 1432 - DNA, 23 bp, Artificial Sequence
  Description of Artificial Sequence: Synthetic oligonucleotide
  Description of Combined DNA/RNA Molecule: Synthetic oligonucleotide
utaaaatauggccuccuccaguu

SEQ ID NO: 1433 - RNA, 23 nt, Artificial Sequence
  Description of Artificial Sequence: Synthetic oligonucleotide
uagcccaauaccagcaugacauu

SEQ ID NO: 1434 - DNA, 23 bp, Artificial Sequence
  Description of Artificial Sequence: Synthetic oligonucleotide
  Description of Combined DNA/RNA Molecule: Synthetic oligonucleotide
uagcccaauaccagcaugacauu

SEQ ID NO: 1435 - RNA, 23 nt, Artificial Sequence
  Description of Artificial Sequence: Synthetic oligonucleotide
ugaagcgcgagccuuuauauuga

SEQ ID NO: 1436 - RNA, 23 nt, Artificial Sequence
  Description of Artificial Sequence: Synthetic oligonucleotide
uggaacccucgcuuauucaggag

SEQ ID NO: 1437 - DNA, 23 bp, Artificial Sequence
  Description of Artificial Sequence: Synthetic oligonucleotide
  Description of Combined DNA/RNA Molecule: Synthetic oligonucleotide
utcaaaaucugtgccaugauuuu

SEQ ID NO: 1438 - RNA, 23 nt, Artificial Sequence
  Description of Artificial Sequence: Synthetic oligonucleotide
uuccacaacuuggcccaaaagaa

SEQ ID NO: 1439 - DNA, 23 bp, Artificial Sequence
  Description of Artificial Sequence: Synthetic oligonucleotide
  Description of Combined DNA/RNA Molecule: Synthetic oligonucleotide
utccacaacuuggcccaaaagaa

SEQ ID NO: 1440 - DNA, 23 bp, Artificial Sequence
  Description of Artificial Sequence: Synthetic oligonucleotide
  Description of Combined DNA/RNA Molecule: Synthetic oligonucleotide
ucaacccaggaaaccauucuucc

SEQ ID NO: 1441 - RNA, 23 nt, Artificial Sequence
  Description of Artificial Sequence: Synthetic oligonucleotide
uacucuggagcuuguucaaauuc

SEQ ID NO: 1442 - RNA, 23 nt, Artificial Sequence
  Description of Artificial Sequence: Synthetic oligonucleotide
uggcuaacuccaucaccaacauc

SEQ ID NO: 1443 - DNA, 23 bp, Artificial Sequence
  Description of Artificial Sequence: Synthetic oligonucleotide
  Description of Combined DNA/RNA Molecule: Synthetic oligonucleotide
ucucggtauauaaucauggcuga

SEQ ID NO: 1444 - DNA, 23 bp, Artificial Sequence
  Description of Artificial Sequence: Synthetic oligonucleotide
  Description of Combined DNA/RNA Molecule: Synthetic oligonucleotide
ugccguagucagcaaucuuugca

SEQ ID NO: 1445 - DNA, 23 bp, Artificial Sequence
  Description of Artificial Sequence: Synthetic oligonucleotide
  Description of Combined DNA/RNA Molecule: Synthetic oligonucleotide
uaaucutugugccacauccuccc

SEQ ID NO: 1446 - DNA, 23 bp, Artificial Sequence
  Description of Artificial Sequence: Synthetic oligonucleotide
  Description of Combined DNA/RNA Molecule: Synthetic oligonucleotide
uaaucutugugccacauccuccc

SEQ ID NO: 1447 - RNA, 23 nt, Artificial Sequence
  Description of Artificial Sequence: Synthetic oligonucleotide
ccuuuauuccugacucuucuaug

SEQ ID NO: 1448 - RNA, 23 nt, Artificial Sequence
  Description of Artificial Sequence: Synthetic oligonucleotide
ccuuuauuccugacucuucuaug

SEQ ID NO: 1449 - RNA, 23 nt, Artificial Sequence
  Description of Artificial Sequence: Synthetic oligonucleotide
uacuacucuaugacauuuugaca

SEQ ID NO: 1450 - RNA, 23 nt, Artificial Sequence
  Description of Artificial Sequence: Synthetic oligonucleotide
uucagcugaauuagucugucuga

SEQ ID NO: 1451 - RNA, 23 nt, Artificial Sequence
  Description of Artificial Sequence: Synthetic oligonucleotide
uucagcugaauuagucugucuga

SEQ ID NO: 1452 - RNA, 23 nt, Artificial Sequence
  Description of Artificial Sequence: Synthetic oligonucleotide
caaaacacaaaaugucuuauucu

SEQ ID NO: 1453 - RNA, 23 nt, Artificial Sequence
  Description of Artificial Sequence: Synthetic oligonucleotide
caaaacacaaaaugucuuauucu

SEQ ID NO: 1454 - RNA, 23 nt, Artificial Sequence
  Description of Artificial Sequence: Synthetic oligonucleotide
auguccaacucugaaacaguuua

SEQ ID NO: 1455 - RNA, 23 nt, Artificial Sequence
  Description of Artificial Sequence: Synthetic oligonucleotide
uuuccaaagaacuacaugucaca

SEQ ID NO: 1456 - RNA, 23 nt, Artificial Sequence
  Description of Artificial Sequence: Synthetic oligonucleotide
accauuccaauaucucagauugc

SEQ ID NO: 1457 - RNA, 23 nt, Artificial Sequence
  Description of Artificial Sequence: Synthetic oligonucleotide
accauuccaauaucucagauugc

SEQ ID NO: 1458 - RNA, 23 nt, Artificial Sequence
  Description of Artificial Sequence: Synthetic oligonucleotide
accugccuagaaauauuauguug

SEQ ID NO: 1459 - RNA, 23 nt, Artificial Sequence
  Description of Artificial Sequence: Synthetic oligonucleotide
gugcugcuuuucacacuguaucc

SEQ ID NO: 1460 - RNA, 23 nt, Artificial Sequence
  Description of Artificial Sequence: Synthetic oligonucleotide
aucucuggaugucaguuacaacu

SEQ ID NO: 1461 - RNA, 23 nt, Artificial Sequence
  Description of Artificial Sequence: Synthetic oligonucleotide
gcagcgagcauuguaccuugcug

SEQ ID NO: 1462 - RNA, 23 nt, Artificial Sequence
  Description of Artificial Sequence: Synthetic oligonucleotide
accacauugauucucucauggaa

SEQ ID NO: 1463 - RNA, 23 nt, Artificial Sequence
  Description of Artificial Sequence: Synthetic oligonucleotide
gucaguacuccauugauguguuu

SEQ ID NO: 1464 - RNA, 23 nt, Artificial Sequence
  Description of Artificial Sequence: Synthetic oligonucleotide
uuucuaaugauuucaccauucag

SEQ ID NO: 1465 - RNA, 23 nt, Artificial Sequence
  Description of Artificial Sequence: Synthetic oligonucleotide
uucuaaugauuucaccauucaga

SEQ ID NO: 1466 - RNA, 23 nt, Artificial Sequence
  Description of Artificial Sequence: Synthetic oligonucleotide
caccauucagaaacucauugaga

SEQ ID NO: 1467 - RNA, 23 nt, Artificial Sequence
  Description of Artificial Sequence: Synthetic oligonucleotide
cuccuggaucuuucaacucgucg

SEQ ID NO: 1468 - RNA, 23 nt, Artificial Sequence
  Description of Artificial Sequence: Synthetic oligonucleotide
cuccuggaucuuucaacucgucg

SEQ ID NO: 1469 - RNA, 23 nt, Artificial Sequence
  Description of Artificial Sequence: Synthetic oligonucleotide
acaucaaucuuccacaugaagug

SEQ ID NO: 1470 - RNA, 23 nt, Artificial Sequence
  Description of Artificial Sequence: Synthetic oligonucleotide
gucucucgaaaugacauuggacc

SEQ ID NO: 1471 - RNA, 23 nt, Artificial Sequence
  Description of Artificial Sequence: Synthetic oligonucleotide
gucucucgaaaugacauuggacc

SEQ ID NO: 1472 - RNA, 23 nt, Artificial Sequence
  Description of Artificial Sequence: Synthetic oligonucleotide
cuuccacacuugcggucuuuaga

SEQ ID NO: 1473 - RNA, 23 nt, Artificial Sequence
  Description of Artificial Sequence: Synthetic oligonucleotide
cuuaagggaacucuuauuuagcc

SEQ ID NO: 1474 - RNA, 23 nt, Artificial Sequence
  Description of Artificial Sequence: Synthetic oligonucleotide
aguagagaaacugcaucuuucuc

SEQ ID NO: 1475 - RNA, 23 nt, Artificial Sequence
  Description of Artificial Sequence: Synthetic oligonucleotide
ugaaaaucugacaucucuggaug

SEQ ID NO: 1476 - RNA, 23 nt, Artificial Sequence
  Description of Artificial Sequence: Synthetic oligonucleotide
uccuagaaaaauuccagauugcu

SEQ ID NO: 1477 - RNA, 23 nt, Artificial Sequence
  Description of Artificial Sequence: Synthetic oligonucleotide
uccuagaaaaauuccagauugcu

SEQ ID NO: 1478 - RNA, 23 nt, Artificial Sequence
  Description of Artificial Sequence: Synthetic oligonucleotide
acuugagauuucaccuuacaugc

SEQ ID NO: 1479 - RNA, 23 nt, Artificial Sequence
  Description of Artificial Sequence: Synthetic oligonucleotide
aggaaggagaucucuuaguaaau

SEQ ID NO: 1480 - RNA, 23 nt, Artificial Sequence
  Description of Artificial Sequence: Synthetic oligonucleotide
gaaggagaucucuuaguaaaucc

SEQ ID NO: 1481 - RNA, 23 nt, Artificial Sequence
  Description of Artificial Sequence: Synthetic oligonucleotide
cauuccaauaucucagauugccc

SEQ ID NO: 1482 - RNA, 23 nt, Artificial Sequence
  Description of Artificial Sequence: Synthetic oligonucleotide
cauuccaauaucucagauugccc

SEQ ID NO: 1483 - RNA, 23 nt, Artificial Sequence
  Description of Artificial Sequence: Synthetic oligonucleotide
cuccagaguuucuccuaggugau

SEQ ID NO: 1484 - RNA, 23 nt, Artificial Sequence
  Description of Artificial Sequence: Synthetic oligonucleotide
gaaaugucaguacuccauugaug

SEQ ID NO: 1485 - RNA, 23 nt, Artificial Sequence
  Description of Artificial Sequence: Synthetic oligonucleotide
uguuugagugaauccacaaauuc

SEQ ID NO: 1486 - RNA, 23 nt, Artificial Sequence
  Description of Artificial Sequence: Synthetic oligonucleotide
gauuuucuccuuuucuaaugauu

SEQ ID NO: 1487 - RNA, 23 nt, Artificial Sequence
  Description of Artificial Sequence: Synthetic oligonucleotide
gauuuucuccuuuucuaaugauu

SEQ ID NO: 1488 - RNA, 23 nt, Artificial Sequence
  Description of Artificial Sequence: Synthetic oligonucleotide
ucuaaugauuucaccauucagaa

SEQ ID NO: 1489 - RNA, 23 nt, Artificial Sequence
  Description of Artificial Sequence: Synthetic oligonucleotide
ugauuucaccauucagaaacuca

SEQ ID NO: 1490 - RNA, 23 nt, Artificial Sequence
  Description of Artificial Sequence: Synthetic oligonucleotide
ugauuucaccauucagaaacuca

SEQ ID NO: 1491 - RNA, 23 nt, Artificial Sequence
  Description of Artificial Sequence: Synthetic oligonucleotide
acaagaacaagccaacuguuuuc

SEQ ID NO: 1492 - RNA, 23 nt, Artificial Sequence
  Description of Artificial Sequence: Synthetic oligonucleotide
uccuggaucuuucaacucgucga

SEQ ID NO: 1493 - RNA, 23 nt, Artificial Sequence
  Description of Artificial Sequence: Synthetic oligonucleotide
ugguuuccagcuuauaccgauuu

SEQ ID NO: 1494 - RNA, 23 nt, Artificial Sequence
  Description of Artificial Sequence: Synthetic oligonucleotide
guuucuaaaccucuguugcaagu

SEQ ID NO: 1495 - RNA, 23 nt, Artificial Sequence
  Description of Artificial Sequence: Synthetic oligonucleotide
uaaaccucuguugcaaguguuuu

SEQ ID NO: 1496 - RNA, 23 nt, Artificial Sequence
  Description of Artificial Sequence: Synthetic oligonucleotide
uaaaccucuguugcaaguguuuu

SEQ ID NO: 1497 - RNA, 23 nt, Artificial Sequence
  Description of Artificial Sequence: Synthetic oligonucleotide
cgagcuuuccacaacagcuaugu

SEQ ID NO: 1498 - RNA, 23 nt, Artificial Sequence
  Description of Artificial Sequence: Synthetic oligonucleotide
uuuuaaaucuuccacacuugcgg

SEQ ID NO: 1499 - RNA, 23 nt, Artificial Sequence
  Description of Artificial Sequence: Synthetic oligonucleotide
uuuuaaaucuuccacacuugcgg

SEQ ID NO: 1500 - RNA, 23 nt, Artificial Sequence
  Description of Artificial Sequence: Synthetic oligonucleotide
ggaacucuuauuuagccauaauc

SEQ ID NO: 1501 - RNA, 23 nt, Artificial Sequence
  Description of Artificial Sequence: Synthetic oligonucleotide
uugagauuucaccuuacaugcuu

SEQ ID NO: 1502 - RNA, 23 nt, Artificial Sequence
  Description of Artificial Sequence: Synthetic oligonucleotide
ccauuccaauaucucagauugcc

SEQ ID NO: 1503 - RNA, 23 nt, Artificial Sequence
  Description of Artificial Sequence: Synthetic oligonucleotide
ugcugcuuuucacacuguauccc

SEQ ID NO: 1504 - RNA, 23 nt, Artificial Sequence
  Description of Artificial Sequence: Synthetic oligonucleotide
uugaauucagcugaauuagucug

SEQ ID NO: 1505 - RNA, 23 nt, Artificial Sequence
  Description of Artificial Sequence: Synthetic oligonucleotide
uuaccuaaaaacguaauuguuga

SEQ ID NO: 1506 - RNA, 23 nt, Artificial Sequence
  Description of Artificial Sequence: Synthetic oligonucleotide
aaugucaguacuccauugaugug

SEQ ID NO: 1507 - RNA, 23 nt, Artificial Sequence
  Description of Artificial Sequence: Synthetic oligonucleotide
ccauucagaaacucauugagaca

SEQ ID NO: 1508 - RNA, 23 nt, Artificial Sequence
  Description of Artificial Sequence: Synthetic oligonucleotide
ccuggaucuuucaacucgucgac

SEQ ID NO: 1509 - RNA, 23 nt, Artificial Sequence
  Description of Artificial Sequence: Synthetic oligonucleotide
cacaugaagugcaaaauuuagaa

SEQ ID NO: 1510 - RNA, 23 nt, Artificial Sequence
  Description of Artificial Sequence: Synthetic oligonucleotide
uuagcaauccucaaauugucagc

SEQ ID NO: 1511 - RNA, 23 nt, Artificial Sequence
  Description of Artificial Sequence: Synthetic oligonucleotide
aaaccucuguugcaaguguuuug

SEQ ID NO: 1512 - RNA, 23 nt, Artificial Sequence
  Description of Artificial Sequence: Synthetic oligonucleotide
aaaccucuguugcaaguguuuug

SEQ ID NO: 1513 - RNA, 23 nt, Artificial Sequence
  Description of Artificial Sequence: Synthetic oligonucleotide
ucuuggcuugguccuuuauuucc

SEQ ID NO: 1514 - RNA, 23 nt, Artificial Sequence
  Description of Artificial Sequence: Synthetic oligonucleotide
cagauaagacuucuaauuuaagg

SEQ ID NO: 1515 - RNA, 23 nt, Artificial Sequence
  Description of Artificial Sequence: Synthetic oligonucleotide
ucucucgaaaugacauuggaccc

SEQ ID NO: 1516 - RNA, 23 nt, Artificial Sequence
  Description of Artificial Sequence: Synthetic oligonucleotide
cugaaacaguuuaaccugucaua

SEQ ID NO: 1517 - RNA, 23 nt, Artificial Sequence
  Description of Artificial Sequence: Synthetic oligonucleotide
gcagaagcauauacauucuccug

SEQ ID NO: 1518 - RNA, 23 nt, Artificial Sequence
  Description of Artificial Sequence: Synthetic oligonucleotide
gcagaagcauauacauucuccug

SEQ ID NO: 1519 - RNA, 23 nt, Artificial Sequence
  Description of Artificial Sequence: Synthetic oligonucleotide
ucuugcugcuaugccuuucuugc

SEQ ID NO: 1520 - RNA, 23 nt, Artificial Sequence
  Description of Artificial Sequence: Synthetic oligonucleotide
cauaaucagaucagcaucuugga

SEQ ID NO: 1521 - RNA, 23 nt, Artificial Sequence
  Description of Artificial Sequence: Synthetic oligonucleotide
aacucugaaauuaucauccgacu

SEQ ID NO: 1522 - RNA, 23 nt, Artificial Sequence
  Description of Artificial Sequence: Synthetic oligonucleotide
aaggagaucucuuaguaaaucca

SEQ ID NO: 1523 - RNA, 23 nt, Artificial Sequence
  Description of Artificial Sequence: Synthetic oligonucleotide
ggagaucucuuaguaaauccaga

SEQ ID NO: 1524 - RNA, 23 nt, Artificial Sequence
  Description of Artificial Sequence: Synthetic oligonucleotide
ggagaucucuuaguaaauccaga

SEQ ID NO: 1525 - RNA, 23 nt, Artificial Sequence
  Description of Artificial Sequence: Synthetic oligonucleotide
caaggcucaccauuccaauaucu

SEQ ID NO: 1526 - RNA, 23 nt, Artificial Sequence
  Description of Artificial Sequence: Synthetic oligonucleotide
caaggcucaccauuccaauaucu

SEQ ID NO: 1527 - RNA, 23 nt, Artificial Sequence
  Description of Artificial Sequence: Synthetic oligonucleotide
aaggcucaccauuccaauaucuc

SEQ ID NO: 1528 - RNA, 23 nt, Artificial Sequence
  Description of Artificial Sequence: Synthetic oligonucleotide
aggcucaccauuccaauaucuca

SEQ ID NO: 1529 - RNA, 23 nt, Artificial Sequence
  Description of Artificial Sequence: Synthetic oligonucleotide
acucagccaugauuauauaccga

SEQ ID NO: 1530 - RNA, 23 nt, Artificial Sequence
  Description of Artificial Sequence: Synthetic oligonucleotide
cacaaugugcugcuuuucacacu

SEQ ID NO: 1531 - RNA, 23 nt, Artificial Sequence
  Description of Artificial Sequence: Synthetic oligonucleotide
uuucacacuguaucccaaugcug

SEQ ID NO: 1532 - RNA, 23 nt, Artificial Sequence
  Description of Artificial Sequence: Synthetic oligonucleotide
uugcucaguacugcuguagaaug

SEQ ID NO: 1533 - RNA, 23 nt, Artificial Sequence
  Description of Artificial Sequence: Synthetic oligonucleotide
gcucaguacugcuguagaauggg

SEQ ID NO: 1534 - RNA, 23 nt, Artificial Sequence
  Description of Artificial Sequence: Synthetic oligonucleotide
gcucaguacugcuguagaauggg

SEQ ID NO: 1535 - RNA, 23 nt, Artificial Sequence
  Description of Artificial Sequence: Synthetic oligonucleotide
ucuuugacauuuugaauucagcu

SEQ ID NO: 1536 - RNA, 23 nt, Artificial Sequence
  Description of Artificial Sequence: Synthetic oligonucleotide
cagcugaauuagucugucugacg

SEQ ID NO: 1537 - RNA, 23 nt, Artificial Sequence
  Description of Artificial Sequence: Synthetic oligonucleotide
cuggucaucaauaccgaagaugg

SEQ ID NO: 1538 - RNA, 23 nt, Artificial Sequence
  Description of Artificial Sequence: Synthetic oligonucleotide
cuggucaucaauaccgaagaugg

SEQ ID NO: 1539 - RNA, 23 nt, Artificial Sequence
  Description of Artificial Sequence: Synthetic oligonucleotide
agcugcuccuuugaagauacuaa

SEQ ID NO: 1540 - RNA, 23 nt, Artificial Sequence
  Description of Artificial Sequence: Synthetic oligonucleotide
aucaaucuuccacaugaagugca

SEQ ID NO: 1541 - RNA, 23 nt, Artificial Sequence
  Description of Artificial Sequence: Synthetic oligonucleotide
aucaaucuuccacaugaagugca

SEQ ID NO: 1542 - RNA, 23 nt, Artificial Sequence
  Description of Artificial Sequence: Synthetic oligonucleotide
cuggguuuaagucuuauaggaua

SEQ ID NO: 1543 - RNA, 23 nt, Artificial Sequence
  Description of Artificial Sequence: Synthetic oligonucleotide
cuggguuuaagucuuauaggaua

SEQ ID NO: 1544 - RNA, 23 nt, Artificial Sequence
  Description of Artificial Sequence: Synthetic oligonucleotide
gaucucgugaacaagauguacga

SEQ ID NO: 1545 - RNA, 23 nt, Artificial Sequence
  Description of Artificial Sequence: Synthetic oligonucleotide
gaucucgugaacaagauguacga

SEQ ID NO: 1546 - RNA, 23 nt, Artificial Sequence
  Description of Artificial Sequence: Synthetic oligonucleotide
auaggaaaaguugaaccuucuug

SEQ ID NO: 1547 - RNA, 23 nt, Artificial Sequence
  Description of Artificial Sequence: Synthetic oligonucleotide
auaggaaaaguugaaccuucuug

SEQ ID NO: 1548 - RNA, 23 nt, Artificial Sequence
  Description of Artificial Sequence: Synthetic oligonucleotide
uaggaaaaguugaaccuucuugg

SEQ ID NO: 1549 - RNA, 23 nt, Artificial Sequence
  Description of Artificial Sequence: Synthetic oligonucleotide
gaaaaguugaaccuucuuggcuu

SEQ ID NO: 1550 - RNA, 23 nt, Artificial Sequence
  Description of Artificial Sequence: Synthetic oligonucleotide
gaaaaguugaaccuucuuggcuu

SEQ ID NO: 1551 - RNA, 23 nt, Artificial Sequence
  Description of Artificial Sequence: Synthetic oligonucleotide
aauuaguguaggagaauuuuacc

SEQ ID NO: 1552 - RNA, 23 nt, Artificial Sequence
  Description of Artificial Sequence: Synthetic oligonucleotide
caaaacuucaaucccauaugagg

SEQ ID NO: 1553 - RNA, 23 nt, Artificial Sequence
  Description of Artificial Sequence: Synthetic oligonucleotide
gacagcauuucuucucuggcuuc

SEQ ID NO: 1554 - RNA, 23 nt, Artificial Sequence
  Description of Artificial Sequence: Synthetic oligonucleotide
auacaccugaauguuuuggaguu

SEQ ID NO: 1555 - RNA, 23 nt, Artificial Sequence
  Description of Artificial Sequence: Synthetic oligonucleotide
acccucagugguuuuagauccua

SEQ ID NO: 1556 - RNA, 23 nt, Artificial Sequence
  Description of Artificial Sequence: Synthetic oligonucleotide
aagcauauacauucuccugaagu

SEQ ID NO: 1557 - RNA, 23 nt, Artificial Sequence
  Description of Artificial Sequence: Synthetic oligonucleotide
uugaacuuaagggaacucuuauu

SEQ ID NO: 1558 - RNA, 23 nt, Artificial Sequence
  Description of Artificial Sequence: Synthetic oligonucleotide
gaucagcaucuuggacuugagug

SEQ ID NO: 1559 - RNA, 23 nt, Artificial Sequence
  Description of Artificial Sequence: Synthetic oligonucleotide
cuuggaacuaagauccuuuccca

SEQ ID NO: 1560 - RNA, 23 nt, Artificial Sequence
  Description of Artificial Sequence: Synthetic oligonucleotide
cuuggaacuaagauccuuuccca

SEQ ID NO: 1561 - RNA, 23 nt, Artificial Sequence
  Description of Artificial Sequence: Synthetic oligonucleotide
auuuuccaaugggauuuugguca

SEQ ID NO: 1562 - RNA, 23 nt, Artificial Sequence
  Description of Artificial Sequence: Synthetic oligonucleotide
ccugaagcuuauugucugguagg

SEQ ID NO: 1563 - RNA, 23 nt, Artificial Sequence
  Description of Artificial Sequence: Synthetic oligonucleotide
ccugaagcuuauugucugguagg

SEQ ID NO: 1564 - RNA, 23 nt, Artificial Sequence
  Description of Artificial Sequence: Synthetic oligonucleotide
gaggaaggagaucucuuaguaaa

SEQ ID NO: 1565 - RNA, 23 nt, Artificial Sequence
  Description of Artificial Sequence: Synthetic oligonucleotide
uuaguaaauccagaucaaccaag

SEQ ID NO: 1566 - RNA, 23 nt, Artificial Sequence
  Description of Artificial Sequence: Synthetic oligonucleotide
aagcuccagaguuucuccuaggu

SEQ ID NO: 1567 - RNA, 23 nt, Artificial Sequence
  Description of Artificial Sequence: Synthetic oligonucleotide
agccucacuagaacccuacagca

SEQ ID NO: 1568 - RNA, 23 nt, Artificial Sequence
  Description of Artificial Sequence: Synthetic oligonucleotide
agcugaugguuugagauaccucc

SEQ ID NO: 1569 - RNA, 23 nt, Artificial Sequence
  Description of Artificial Sequence: Synthetic oligonucleotide
cucagccaugauuauauaccgag

SEQ ID NO: 1570 - RNA, 23 nt, Artificial Sequence
  Description of Artificial Sequence: Synthetic oligonucleotide
auugcaaagauugcugacuacgg

SEQ ID NO: 1571 - RNA, 23 nt, Artificial Sequence
  Description of Artificial Sequence: Synthetic oligonucleotide
agcugaauuagucugucugacga

SEQ ID NO: 1572 - RNA, 23 nt, Artificial Sequence
  Description of Artificial Sequence: Synthetic oligonucleotide
cagaggacagcucucauuucuug

SEQ ID NO: 1573 - RNA, 23 nt, Artificial Sequence
  Description of Artificial Sequence: Synthetic oligonucleotide
ucuccuggucaucaauaccgaag

SEQ ID NO: 1574 - RNA, 23 nt, Artificial Sequence
  Description of Artificial Sequence: Synthetic oligonucleotide
auauaggaaaugucaguacucca

SEQ ID NO: 1575 - RNA, 23 nt, Artificial Sequence
  Description of Artificial Sequence: Synthetic oligonucleotide
uacuccauugauguguuugagug

SEQ ID NO: 1576 - RNA, 23 nt, Artificial Sequence
  Description of Artificial Sequence: Synthetic oligonucleotide
ugauguguuugagugaauccaca

SEQ ID NO: 1577 - RNA, 23 nt, Artificial Sequence
  Description of Artificial Sequence: Synthetic oligonucleotide
gagacaagaacaagccaacuguu

SEQ ID NO: 1578 - RNA, 23 nt, Artificial Sequence
  Description of Artificial Sequence: Synthetic oligonucleotide
gaagaacacugcucuuuggauag

SEQ ID NO: 1579 - RNA, 23 nt, Artificial Sequence
  Description of Artificial Sequence: Synthetic oligonucleotide
gaagaacacugcucuuuggauag

SEQ ID NO: 1580 - RNA, 23 nt, Artificial Sequence
  Description of Artificial Sequence: Synthetic oligonucleotide
uccacaugaagugcaaaauuuag

SEQ ID NO: 1581 - RNA, 23 nt, Artificial Sequence
  Description of Artificial Sequence: Synthetic oligonucleotide
aaauaggaauugucuuuggauag

SEQ ID NO: 1582 - RNA, 23 nt, Artificial Sequence
  Description of Artificial Sequence: Synthetic oligonucleotide
aaauaggaauugucuuuggauag

SEQ ID NO: 1583 - RNA, 23 nt, Artificial Sequence
  Description of Artificial Sequence: Synthetic oligonucleotide
cuucacacacugcagauguaucc

SEQ ID NO: 1584 - RNA, 23 nt, Artificial Sequence
  Description of Artificial Sequence: Synthetic oligonucleotide
agugucuggguuuaagucuuaua

SEQ ID NO: 1585 - RNA, 23 nt, Artificial Sequence
  Description of Artificial Sequence: Synthetic oligonucleotide
aaaggauuucagacaaucuuagc

SEQ ID NO: 1586 - RNA, 23 nt, Artificial Sequence
  Description of Artificial Sequence: Synthetic oligonucleotide
uuuuaccgagaugccguauuaca

SEQ ID NO: 1587 - RNA, 23 nt, Artificial Sequence
  Description of Artificial Sequence: Synthetic oligonucleotide
ggacccucagugguuuuagaucc

SEQ ID NO: 1588 - RNA, 23 nt, Artificial Sequence
  Description of Artificial Sequence: Synthetic oligonucleotide
acaguuuaaccugucauauaacc

SEQ ID NO: 1589 - RNA, 23 nt, Artificial Sequence
  Description of Artificial Sequence: Synthetic oligonucleotide
acaguuuaaccugucauauaacc

SEQ ID NO: 1590 - RNA, 23 nt, Artificial Sequence
  Description of Artificial Sequence: Synthetic oligonucleotide
cuugcugcuaugccuuucuugcc

SEQ ID NO: 1591 - RNA, 23 nt, Artificial Sequence
  Description of Artificial Sequence: Synthetic oligonucleotide
ugcugcuaugccuuucuugccuc

SEQ ID NO: 1592 - RNA, 23 nt, Artificial Sequence
  Description of Artificial Sequence: Synthetic oligonucleotide
uuuaaaucuuccacacuugcggu

SEQ ID NO: 1593 - RNA, 23 nt, Artificial Sequence
  Description of Artificial Sequence: Synthetic oligonucleotide
ugaacuuaagggaacucuuauuu

SEQ ID NO: 1594 - RNA, 23 nt, Artificial Sequence
  Description of Artificial Sequence: Synthetic oligonucleotide
agaucagcaucuuggacuugagu

SEQ ID NO: 1595 - RNA, 23 nt, Artificial Sequence
  Description of Artificial Sequence: Synthetic oligonucleotide
agaucagcaucuuggacuugagu

SEQ ID NO: 1596 - RNA, 23 nt, Artificial Sequence
  Description of Artificial Sequence: Synthetic oligonucleotide
uuauaaccgaaugaaacuuauga

SEQ ID NO: 1597 - RNA, 23 nt, Artificial Sequence
  Description of Artificial Sequence: Synthetic oligonucleotide
ggcacacauuuggauguuucuga

SEQ ID NO: 1598 - RNA, 23 nt, Artificial Sequence
  Description of Artificial Sequence: Synthetic oligonucleotide
ugaugcuuuggcaaaacuucgga

SEQ ID NO: 1599 - RNA, 23 nt, Artificial Sequence
  Description of Artificial Sequence: Synthetic oligonucleotide
auuccagacugcuauguagaacu

SEQ ID NO: 1600 - RNA, 23 nt, Artificial Sequence
  Description of Artificial Sequence: Synthetic oligonucleotide
ugaaucaggaguccuucuucauu

SEQ ID NO: 1601 - RNA, 23 nt, Artificial Sequence
  Description of Artificial Sequence: Synthetic oligonucleotide
augccuuauuuuccaaugggauu

SEQ ID NO: 1602 - RNA, 23 nt, Artificial Sequence
  Description of Artificial Sequence: Synthetic oligonucleotide
augccuuauuuuccaaugggauu

SEQ ID NO: 1603 - RNA, 23 nt, Artificial Sequence
  Description of Artificial Sequence: Synthetic oligonucleotide
uaaaaauuacaguuccuucuugu

SEQ ID NO: 1604 - RNA, 23 nt, Artificial Sequence
  Description of Artificial Sequence: Synthetic oligonucleotide
aaaaucuuacuugaugacuugau

SEQ ID NO: 1605 - RNA, 23 nt, Artificial Sequence
  Description of Artificial Sequence: Synthetic oligonucleotide
gaguuggaauuugaacaagcucc

SEQ ID NO: 1606 - RNA, 23 nt, Artificial Sequence
  Description of Artificial Sequence: Synthetic oligonucleotide
caagcuccagaguuucuccuagg

SEQ ID NO: 1607 - RNA, 23 nt, Artificial Sequence
  Description of Artificial Sequence: Synthetic oligonucleotide
uccagaguuucuccuaggugaug

SEQ ID NO: 1608 - RNA, 23 nt, Artificial Sequence
  Description of Artificial Sequence: Synthetic oligonucleotide
cagccucacuagaacccuacagc

SEQ ID NO: 1609 - RNA, 23 nt, Artificial Sequence
  Description of Artificial Sequence: Synthetic oligonucleotide
cagccucacuagaacccuacagc

SEQ ID NO: 1610 - RNA, 23 nt, Artificial Sequence
  Description of Artificial Sequence: Synthetic oligonucleotide
ccacucagccaugauuauauacc

SEQ ID NO: 1611 - RNA, 23 nt, Artificial Sequence
  Description of Artificial Sequence: Synthetic oligonucleotide
ccacucagccaugauuauauacc

SEQ ID NO: 1612 - RNA, 23 nt, Artificial Sequence
  Description of Artificial Sequence: Synthetic oligonucleotide
cacucagccaugauuauauaccg

SEQ ID NO: 1613 - RNA, 23 nt, Artificial Sequence
  Description of Artificial Sequence: Synthetic oligonucleotide
cacucagccaugauuauauaccg

SEQ ID NO: 1614 - RNA, 23 nt, Artificial Sequence
  Description of Artificial Sequence: Synthetic oligonucleotide
uagccuuggugcaucuuccuguu

SEQ ID NO: 1615 - RNA, 23 nt, Artificial Sequence
  Description of Artificial Sequence: Synthetic oligonucleotide
uagccuuggugcaucuuccuguu

SEQ ID NO: 1616 - RNA, 23 nt, Artificial Sequence
  Description of Artificial Sequence: Synthetic oligonucleotide
agccuuggugcaucuuccuguug

SEQ ID NO: 1617 - RNA, 23 nt, Artificial Sequence
  Description of Artificial Sequence: Synthetic oligonucleotide
ucaucaauaccgaagaugggaaa

SEQ ID NO: 1618 - RNA, 23 nt, Artificial Sequence
  Description of Artificial Sequence: Synthetic oligonucleotide
cacuuguuuguauugcaauuccu

SEQ ID NO: 1619 - RNA, 23 nt, Artificial Sequence
  Description of Artificial Sequence: Synthetic oligonucleotide
cacuuguuuguauugcaauuccu

SEQ ID NO: 1620 - RNA, 23 nt, Artificial Sequence
  Description of Artificial Sequence: Synthetic oligonucleotide
guacuccauugauguguuugagu

SEQ ID NO: 1621 - RNA, 23 nt, Artificial Sequence
  Description of Artificial Sequence: Synthetic oligonucleotide
cagaaagagauacaaucuugcuu

SEQ ID NO: 1622 - RNA, 23 nt, Artificial Sequence
  Description of Artificial Sequence: Synthetic oligonucleotide
cagaaagagauacaaucuugcuu

SEQ ID NO: 1623 - RNA, 23 nt, Artificial Sequence
  Description of Artificial Sequence: Synthetic oligonucleotide
uacacuagcaagaauggugauca

SEQ ID NO: 1624 - RNA, 23 nt, Artificial Sequence
  Description of Artificial Sequence: Synthetic oligonucleotide
aaucuuccacacuugcggucuuu

SEQ ID NO: 1625 - RNA, 23 nt, Artificial Sequence
  Description of Artificial Sequence: Synthetic oligonucleotide
aaucuuccacacuugcggucuuu

SEQ ID NO: 1626 - RNA, 23 nt, Artificial Sequence
  Description of Artificial Sequence: Synthetic oligonucleotide
aucuuccacacuugcggucuuua

SEQ ID NO: 1627 - RNA, 23 nt, Artificial Sequence
  Description of Artificial Sequence: Synthetic oligonucleotide
acuugcggucuuuagauaugagc

SEQ ID NO: 1628 - RNA, 23 nt, Artificial Sequence
  Description of Artificial Sequence: Synthetic oligonucleotide
auuguaccuugcugucuaugacc

SEQ ID NO: 1629 - RNA, 23 nt, Artificial Sequence
  Description of Artificial Sequence: Synthetic oligonucleotide
gagcuuccucacgcaguucacuu

SEQ ID NO: 1630 - RNA, 23 nt, Artificial Sequence
  Description of Artificial Sequence: Synthetic oligonucleotide
gacagugaaaguggaagguuguc

SEQ ID NO: 1631 - RNA, 23 nt, Artificial Sequence
  Description of Artificial Sequence: Synthetic oligonucleotide
gacagugaaaguggaagguuguc

SEQ ID NO: 1632 - RNA, 23 nt, Artificial Sequence
  Description of Artificial Sequence: Synthetic oligonucleotide
gugauggcaguuuuggaucaguu

SEQ ID NO: 1633 - RNA, 23 nt, Artificial Sequence
  Description of Artificial Sequence: Synthetic oligonucleotide
uuuucacacuguaucccaaugcu

SEQ ID NO: 1634 - RNA, 23 nt, Artificial Sequence
  Description of Artificial Sequence: Synthetic oligonucleotide
gccaucauugcaaagauugcuga

SEQ ID NO: 1635 - RNA, 23 nt, Artificial Sequence
  Description of Artificial Sequence: Synthetic oligonucleotide
ugcucaguacugcuguagaaugg

SEQ ID NO: 1636 - RNA, 23 nt, Artificial Sequence
  Description of Artificial Sequence: Synthetic oligonucleotide
cugaauuagucugucugacgaga

SEQ ID NO: 1637 - RNA, 23 nt, Artificial Sequence
  Description of Artificial Sequence: Synthetic oligonucleotide
cugaauuagucugucugacgaga

SEQ ID NO: 1638 - RNA, 23 nt, Artificial Sequence
  Description of Artificial Sequence: Synthetic oligonucleotide
gauaguagaauauugugcuuagc

SEQ ID NO: 1639 - RNA, 23 nt, Artificial Sequence
  Description of Artificial Sequence: Synthetic oligonucleotide
cugggacacagucugguacucuc

SEQ ID NO: 1640 - RNA, 23 nt, Artificial Sequence
  Description of Artificial Sequence: Synthetic oligonucleotide
gacacagucugguacucuccugg

SEQ ID NO: 1641 - RNA, 23 nt, Artificial Sequence
  Description of Artificial Sequence: Synthetic oligonucleotide
gacacagucugguacucuccugg

SEQ ID NO: 1642 - RNA, 23 nt, Artificial Sequence
  Description of Artificial Sequence: Synthetic oligonucleotide
uggucaucaauaccgaagauggg

SEQ ID NO: 1643 - RNA, 23 nt, Artificial Sequence
  Description of Artificial Sequence: Synthetic oligonucleotide
uggucaucaauaccgaagauggg

SEQ ID NO: 1644 - RNA, 23 nt, Artificial Sequence
  Description of Artificial Sequence: Synthetic oligonucleotide
augggaaaaagagacauacccua

SEQ ID NO: 1645 - RNA, 23 nt, Artificial Sequence
  Description of Artificial Sequence: Synthetic oligonucleotide
aaaaagagacauacccuagaaaa

SEQ ID NO: 1646 - RNA, 23 nt, Artificial Sequence
  Description of Artificial Sequence: Synthetic oligonucleotide
gauacuaaauauaggaaauguca

SEQ ID NO: 1647 - RNA, 23 nt, Artificial Sequence
  Description of Artificial Sequence: Synthetic oligonucleotide
gauacuaaauauaggaaauguca

SEQ ID NO: 1648 - RNA, 23 nt, Artificial Sequence
  Description of Artificial Sequence: Synthetic oligonucleotide
uugauguguuugagugaauccac

SEQ ID NO: 1649 - RNA, 23 nt, Artificial Sequence
  Description of Artificial Sequence: Synthetic oligonucleotide
ccacaugaagugcaaaauuuaga

SEQ ID NO: 1650 - RNA, 23 nt, Artificial Sequence
  Description of Artificial Sequence: Synthetic oligonucleotide
gaagugagaaaagaauuagcuga

SEQ ID NO: 1651 - RNA, 23 nt, Artificial Sequence
  Description of Artificial Sequence: Synthetic oligonucleotide
ugaauuuucuugcugcuaugccu

SEQ ID NO: 1652 - RNA, 23 nt, Artificial Sequence
  Description of Artificial Sequence: Synthetic oligonucleotide
aagaauauuugcugguuccaagc

SEQ ID NO: 1653 - RNA, 23 nt, Artificial Sequence
  Description of Artificial Sequence: Synthetic oligonucleotide
uauuuuccaaugggauuuugguc

SEQ ID NO: 1654 - RNA, 23 nt, Artificial Sequence
  Description of Artificial Sequence: Synthetic oligonucleotide
uggguugcuggagauugauauuu

SEQ ID NO: 1655 - RNA, 23 nt, Artificial Sequence
  Description of Artificial Sequence: Synthetic oligonucleotide
ggugaaggagaaacucuguugaa

SEQ ID NO: 1656 - RNA, 23 nt, Artificial Sequence
  Description of Artificial Sequence: Synthetic oligonucleotide
ggugauggcaguuuuggaucagu

SEQ ID NO: 1657 - RNA, 23 nt, Artificial Sequence
  Description of Artificial Sequence: Synthetic oligonucleotide
ggugauggcaguuuuggaucagu

SEQ ID NO: 1658 - RNA, 23 nt, Artificial Sequence
  Description of Artificial Sequence: Synthetic oligonucleotide
uugcaaagauugcugacuacggc

SEQ ID NO: 1659 - RNA, 23 nt, Artificial Sequence
  Description of Artificial Sequence: Synthetic oligonucleotide
uugcaaagauugcugacuacggc

SEQ ID NO: 1660 - RNA, 23 nt, Artificial Sequence
  Description of Artificial Sequence: Synthetic oligonucleotide
cacagucugguacucuccugguc

SEQ ID NO: 1661 - RNA, 23 nt, Artificial Sequence
  Description of Artificial Sequence: Synthetic oligonucleotide
cucuccuggucaucaauaccgaa

SEQ ID NO: 1662 - RNA, 23 nt, Artificial Sequence
  Description of Artificial Sequence: Synthetic oligonucleotide
cucuccuggucaucaauaccgaa

SEQ ID NO: 1663 - RNA, 23 nt, Artificial Sequence
  Description of Artificial Sequence: Synthetic oligonucleotide
cuccuggucaucaauaccgaaga

SEQ ID NO: 1664 - RNA, 23 nt, Artificial Sequence
  Description of Artificial Sequence: Synthetic oligonucleotide
cuccuggucaucaauaccgaaga

SEQ ID NO: 1665 - RNA, 23 nt, Artificial Sequence
  Description of Artificial Sequence: Synthetic oligonucleotide
uccuggucaucaauaccgaagau

SEQ ID NO: 1666 - RNA, 23 nt, Artificial Sequence
  Description of Artificial Sequence: Synthetic oligonucleotide
caauaccgaagaugggaaaaaga

SEQ ID NO: 1667 - RNA, 23 nt, Artificial Sequence
  Description of Artificial Sequence: Synthetic oligonucleotide
caauaccgaagaugggaaaaaga

SEQ ID NO: 1668 - RNA, 23 nt, Artificial Sequence
  Description of Artificial Sequence: Synthetic oligonucleotide
cugcucuuuggauaggaacugga

SEQ ID NO: 1669 - RNA, 23 nt, Artificial Sequence
  Description of Artificial Sequence: Synthetic oligonucleotide
cugcucuuuggauaggaacugga

SEQ ID NO: 1670 - RNA, 23 nt, Artificial Sequence
  Description of Artificial Sequence: Synthetic oligonucleotide
ugaaaauauuaagacaguuuccc

SEQ ID NO: 1671 - RNA, 23 nt, Artificial Sequence
  Description of Artificial Sequence: Synthetic oligonucleotide
ugaaaauauuaagacaguuuccc

SEQ ID NO: 1672 - RNA, 23 nt, Artificial Sequence
  Description of Artificial Sequence: Synthetic oligonucleotide
aagaauggugaucagauaucaga

SEQ ID NO: 1673 - RNA, 23 nt, Artificial Sequence
  Description of Artificial Sequence: Synthetic oligonucleotide
guaggagaauuuuaccgagaugc

SEQ ID NO: 1674 - RNA, 23 nt, Artificial Sequence
  Description of Artificial Sequence: Synthetic oligonucleotide
aauuuuaccgagaugccguauua

SEQ ID NO: 1675 - RNA, 23 nt, Artificial Sequence
  Description of Artificial Sequence: Synthetic oligonucleotide
aauuuuaccgagaugccguauua

SEQ ID NO: 1676 - RNA, 23 nt, Artificial Sequence
  Description of Artificial Sequence: Synthetic oligonucleotide
accagaaugcacucacgagcuuu

SEQ ID NO: 1677 - RNA, 23 nt, Artificial Sequence
  Description of Artificial Sequence: Synthetic oligonucleotide
gagaacuuucuugaggcuugucc

SEQ ID NO: 1678 - RNA, 23 nt, Artificial Sequence
  Description of Artificial Sequence: Synthetic oligonucleotide
uaaaucuuccacacuugcggucu

SEQ ID NO: 1679 - RNA, 23 nt, Artificial Sequence
  Description of Artificial Sequence: Synthetic oligonucleotide
uaaaucuuccacacuugcggucu

SEQ ID NO: 1680 - RNA, 23 nt, Artificial Sequence
  Description of Artificial Sequence: Synthetic oligonucleotide
auaaaggcucgcgcuucuucuuc

SEQ ID NO: 1681 - RNA, 23 nt, Artificial Sequence
  Description of Artificial Sequence: Synthetic oligonucleotide
gauucucguuggcacacauuugg

SEQ ID NO: 1682 - RNA, 23 nt, Artificial Sequence
  Description of Artificial Sequence: Synthetic oligonucleotide
gaaauuaucauccgacuauauga

SEQ ID NO: 1683 - RNA, 23 nt, Artificial Sequence
  Description of Artificial Sequence: Synthetic oligonucleotide
auuuacuuaaauuggucuccuga

SEQ ID NO: 1684 - RNA, 23 nt, Artificial Sequence
  Description of Artificial Sequence: Synthetic oligonucleotide
gcuuauugucugguaggaucuga

SEQ ID NO: 1685 - RNA, 23 nt, Artificial Sequence
  Description of Artificial Sequence: Synthetic oligonucleotide
gcuuauugucugguaggaucuga

SEQ ID NO: 1686 - RNA, 23 nt, Artificial Sequence
  Description of Artificial Sequence: Synthetic oligonucleotide
cuuguagaaaaggcuguauucuu

SEQ ID NO: 1687 - RNA, 23 nt, Artificial Sequence
  Description of Artificial Sequence: Synthetic oligonucleotide
guuguggaccacauugauucucu

SEQ ID NO: 1688 - RNA, 23 nt, Artificial Sequence
  Description of Artificial Sequence: Synthetic oligonucleotide
guuguggaccacauugauucucu

SEQ ID NO: 1689 - RNA, 23 nt, Artificial Sequence
  Description of Artificial Sequence: Synthetic oligonucleotide
cuggguugcuggagauugauauu

SEQ ID NO: 1690 - RNA, 23 nt, Artificial Sequence
  Description of Artificial Sequence: Synthetic oligonucleotide
gcugaccugccuagaaauauuau

SEQ ID NO: 1691 - RNA, 23 nt, Artificial Sequence
  Description of Artificial Sequence: Synthetic oligonucleotide
ucacacuguaucccaaugcugcc

SEQ ID NO: 1692 - RNA, 23 nt, Artificial Sequence
  Description of Artificial Sequence: Synthetic oligonucleotide
caaagauugcugacuacggcauu

SEQ ID NO: 1693 - RNA, 23 nt, Artificial Sequence
  Description of Artificial Sequence: Synthetic oligonucleotide
caaagauugcugacuacggcauu

SEQ ID NO: 1694 - RNA, 23 nt, Artificial Sequence
  Description of Artificial Sequence: Synthetic oligonucleotide
acaacuggagguagaauaguaga

SEQ ID NO: 1695 - RNA, 23 nt, Artificial Sequence
  Description of Artificial Sequence: Synthetic oligonucleotide
uaguagaggguuugaaguuucca

SEQ ID NO: 1696 - RNA, 23 nt, Artificial Sequence
  Description of Artificial Sequence: Synthetic oligonucleotide
auaguagaauauugugcuuagcc

SEQ ID NO: 1697 - RNA, 23 nt, Artificial Sequence
  Description of Artificial Sequence: Synthetic oligonucleotide
ucugggacacagucugguacucu

SEQ ID NO: 1698 - RNA, 23 nt, Artificial Sequence
  Description of Artificial Sequence: Synthetic oligonucleotide
ucugggacacagucugguacucu

SEQ ID NO: 1699 - RNA, 23 nt, Artificial Sequence
  Description of Artificial Sequence: Synthetic oligonucleotide
acucuccuggucaucaauaccga

SEQ ID NO: 1700 - RNA, 23 nt, Artificial Sequence
  Description of Artificial Sequence: Synthetic oligonucleotide
cacaaaaugucuuauucugggag

SEQ ID NO: 1701 - RNA, 23 nt, Artificial Sequence
  Description of Artificial Sequence: Synthetic oligonucleotide
aaugcacucacgagcuuuccaca

SEQ ID NO: 1702 - RNA, 23 nt, Artificial Sequence
  Description of Artificial Sequence: Synthetic oligonucleotide
aaugcacucacgagcuuuccaca

SEQ ID NO: 1703 - RNA, 23 nt, Artificial Sequence
  Description of Artificial Sequence: Synthetic oligonucleotide
agauaugagcagcaaugauauuc

SEQ ID NO: 1704 - RNA, 23 nt, Artificial Sequence
  Description of Artificial Sequence: Synthetic oligonucleotide
aaacgagagccuuaauuucaaga

SEQ ID NO: 1705 - RNA, 23 nt, Artificial Sequence
  Description of Artificial Sequence: Synthetic oligonucleotide
aaaaugagcuuccucacgcaguu

SEQ ID NO: 1706 - RNA, 23 nt, Artificial Sequence
  Description of Artificial Sequence: Synthetic oligonucleotide
acagugaaaguggaagguugucc

SEQ ID NO: 1707 - RNA, 23 nt, Artificial Sequence
  Description of Artificial Sequence: Synthetic oligonucleotide
acagugaaaguggaagguugucc

SEQ ID NO: 1708 - RNA, 23 nt, Artificial Sequence
  Description of Artificial Sequence: Synthetic oligonucleotide
ucgcccaaacagaauguauuggc

SEQ ID NO: 1709 - RNA, 23 nt, Artificial Sequence
  Description of Artificial Sequence: Synthetic oligonucleotide
cuccugaagcuuauugucuggua

SEQ ID NO: 1710 - RNA, 23 nt, Artificial Sequence
  Description of Artificial Sequence: Synthetic oligonucleotide
cugaagcuuauugucugguagga

SEQ ID NO: 1711 - RNA, 23 nt, Artificial Sequence
  Description of Artificial Sequence: Synthetic oligonucleotide
cugaagcuuauugucugguagga

SEQ ID NO: 1712 - RNA, 23 nt, Artificial Sequence
  Description of Artificial Sequence: Synthetic oligonucleotide
cugaccugccuagaaauauuaug

SEQ ID NO: 1713 - RNA, 23 nt, Artificial Sequence
  Description of Artificial Sequence: Synthetic oligonucleotide
agccuccaaggguuccuuggauc

SEQ ID NO: 1714 - RNA, 23 nt, Artificial Sequence
  Description of Artificial Sequence: Synthetic oligonucleotide
agccuccaaggguuccuuggauc

SEQ ID NO: 1715 - RNA, 23 nt, Artificial Sequence
  Description of Artificial Sequence: Synthetic oligonucleotide
cccacaaugugcugcuuuucaca

SEQ ID NO: 1716 - RNA, 23 nt, Artificial Sequence
  Description of Artificial Sequence: Synthetic oligonucleotide
uggagguagaauaguagaggguu

SEQ ID NO: 1717 - RNA, 23 nt, Artificial Sequence
  Description of Artificial Sequence: Synthetic oligonucleotide
auccaguuaaagaauaugguugu

SEQ ID NO: 1718 - RNA, 23 nt, Artificial Sequence
  Description of Artificial Sequence: Synthetic oligonucleotide
cuuagccuuggugcaucuuccug

SEQ ID NO: 1719 - RNA, 23 nt, Artificial Sequence
  Description of Artificial Sequence: Synthetic oligonucleotide
cuuagccuuggugcaucuuccug

SEQ ID NO: 1720 - RNA, 23 nt, Artificial Sequence
  Description of Artificial Sequence: Synthetic oligonucleotide
acagucugguacucuccugguca

SEQ ID NO: 1721 - RNA, 23 nt, Artificial Sequence
  Description of Artificial Sequence: Synthetic oligonucleotide
gucaucaauaccgaagaugggaa

SEQ ID NO: 1722 - RNA, 23 nt, Artificial Sequence
  Description of Artificial Sequence: Synthetic oligonucleotide
uuuucuuuugguuggaaccgcug

SEQ ID NO: 1723 - RNA, 23 nt, Artificial Sequence
  Description of Artificial Sequence: Synthetic oligonucleotide
cccuguuguggaagugugggaua

SEQ ID NO: 1724 - RNA, 23 nt, Artificial Sequence
  Description of Artificial Sequence: Synthetic oligonucleotide
acugcucuuuggauaggaacugg

SEQ ID NO: 1725 - RNA, 23 nt, Artificial Sequence
  Description of Artificial Sequence: Synthetic oligonucleotide
acugcucuuuggauaggaacugg

SEQ ID NO: 1726 - RNA, 23 nt, Artificial Sequence
  Description of Artificial Sequence: Synthetic oligonucleotide
uaauucggucagagucaugauga

SEQ ID NO: 1727 - RNA, 23 nt, Artificial Sequence
  Description of Artificial Sequence: Synthetic oligonucleotide
uaauucggucagagucaugauga

SEQ ID NO: 1728 - RNA, 23 nt, Artificial Sequence
  Description of Artificial Sequence: Synthetic oligonucleotide
cauacuaaaauuuauaaggccga

SEQ ID NO: 1729 - RNA, 23 nt, Artificial Sequence
  Description of Artificial Sequence: Synthetic oligonucleotide
uacuaaaauuuauaaggccgaua

SEQ ID NO: 1730 - RNA, 23 nt, Artificial Sequence
  Description of Artificial Sequence: Synthetic oligonucleotide
guggccaacaauagcauuugccu

SEQ ID NO: 1731 - RNA, 23 nt, Artificial Sequence
  Description of Artificial Sequence: Synthetic oligonucleotide
guggccaacaauagcauuugccu

SEQ ID NO: 1732 - RNA, 23 nt, Artificial Sequence
  Description of Artificial Sequence: Synthetic oligonucleotide
gaacuccugaauaagcgaggguu

SEQ ID NO: 1733 - RNA, 23 nt, Artificial Sequence
  Description of Artificial Sequence: Synthetic oligonucleotide
uacuuaaauuggucuccugaagc

SEQ ID NO: 1734 - RNA, 23 nt, Artificial Sequence
  Description of Artificial Sequence: Synthetic oligonucleotide
gaagcuuauugucugguaggauc

SEQ ID NO: 1735 - RNA, 23 nt, Artificial Sequence
  Description of Artificial Sequence: Synthetic oligonucleotide
gaagcuuauugucugguaggauc

SEQ ID NO: 1736 - RNA, 23 nt, Artificial Sequence
  Description of Artificial Sequence: Synthetic oligonucleotide
uguugaagaaaugggcauuauau

SEQ ID NO: 1737 - RNA, 23 nt, Artificial Sequence
  Description of Artificial Sequence: Synthetic oligonucleotide
uguugaagaaaugggcauuauau

SEQ ID NO: 1738 - RNA, 23 nt, Artificial Sequence
  Description of Artificial Sequence: Synthetic oligonucleotide
aagcagaggaaggagaucucuua

SEQ ID NO: 1739 - RNA, 23 nt, Artificial Sequence
  Description of Artificial Sequence: Synthetic oligonucleotide
uaaauccagaucaaccaaggcuc

SEQ ID NO: 1740 - RNA, 23 nt, Artificial Sequence
  Description of Artificial Sequence: Synthetic oligonucleotide
uaaauccagaucaaccaaggcuc

SEQ ID NO: 1741 - RNA, 23 nt, Artificial Sequence
  Description of Artificial Sequence: Synthetic oligonucleotide
aaauccagaucaaccaaggcuca

SEQ ID NO: 1742 - RNA, 23 nt, Artificial Sequence
  Description of Artificial Sequence: Synthetic oligonucleotide
ccagaguuucuccuaggugaugg

SEQ ID NO: 1743 - RNA, 23 nt, Artificial Sequence
  Description of Artificial Sequence: Synthetic oligonucleotide
ccagaguuucuccuaggugaugg

SEQ ID NO: 1744 - RNA, 23 nt, Artificial Sequence
  Description of Artificial Sequence: Synthetic oligonucleotide
agaauauugugcuuagccuuggu

SEQ ID NO: 1745 - RNA, 23 nt, Artificial Sequence
  Description of Artificial Sequence: Synthetic oligonucleotide
gaauauugugcuuagccuuggug

SEQ ID NO: 1746 - RNA, 23 nt, Artificial Sequence
  Description of Artificial Sequence: Synthetic oligonucleotide
gaauauugugcuuagccuuggug

SEQ ID NO: 1747 - RNA, 23 nt, Artificial Sequence
  Description of Artificial Sequence: Synthetic oligonucleotide
aauuuucuuuugguuggaaccgc

SEQ ID NO: 1748 - RNA, 23 nt, Artificial Sequence
  Description of Artificial Sequence: Synthetic oligonucleotide
uucuuuugguuggaaccgcugau

SEQ ID NO: 1749 - RNA, 23 nt, Artificial Sequence
  Description of Artificial Sequence: Synthetic oligonucleotide
aauagcccuguuguggaagugug

SEQ ID NO: 1750 - RNA, 23 nt, Artificial Sequence
  Description of Artificial Sequence: Synthetic oligonucleotide
aauagcccuguuguggaagugug

SEQ ID NO: 1751 - RNA, 23 nt, Artificial Sequence
  Description of Artificial Sequence: Synthetic oligonucleotide
auaggaauugucuuuggauagga

SEQ ID NO: 1752 - RNA, 23 nt, Artificial Sequence
  Description of Artificial Sequence: Synthetic oligonucleotide
uguauucuuuugggccaaguugu

SEQ ID NO: 1753 - RNA, 23 nt, Artificial Sequence
  Description of Artificial Sequence: Synthetic oligonucleotide
ggauguuggugauggaguuagcc

SEQ ID NO: 1754 - RNA, 23 nt, Artificial Sequence
  Description of Artificial Sequence: Synthetic oligonucleotide
ggauguuggugauggaguuagcc

SEQ ID NO: 1755 - RNA, 23 nt, Artificial Sequence
  Description of Artificial Sequence: Synthetic oligonucleotide
agauugcugacuacggcauugcu

SEQ ID NO: 1756 - RNA, 23 nt, Artificial Sequence
  Description of Artificial Sequence: Synthetic oligonucleotide
aaugauauucacaaacugguccu

SEQ ID NO: 1757 - RNA, 23 nt, Artificial Sequence
  Description of Artificial Sequence: Synthetic oligonucleotide
auuuucuuuugguuggaaccgcu

SEQ ID NO: 1758 - RNA, 23 nt, Artificial Sequence
  Description of Artificial Sequence: Synthetic oligonucleotide
cuuaaaaaugucaugcugguauu

SEQ ID NO: 1759 - RNA, 23 nt, Artificial Sequence
  Description of Artificial Sequence: Synthetic oligonucleotide
uaaaaaugucaugcugguauugg

SEQ ID NO: 1760 - RNA, 23 nt, Artificial Sequence
  Description of Artificial Sequence: Synthetic oligonucleotide
gaaaauauuaagacaguuuccca

SEQ ID NO: 1761 - RNA, 23 nt, Artificial Sequence
  Description of Artificial Sequence: Synthetic oligonucleotide
gugaugcuagagagagcguguga

SEQ ID NO: 1762 - RNA, 23 nt, Artificial Sequence
  Description of Artificial Sequence: Synthetic oligonucleotide
uucaauauaaaggcucgcgcuuc

SEQ ID NO: 1763 - RNA, 23 nt, Artificial Sequence
  Description of Artificial Sequence: Synthetic oligonucleotide
auauaaaggcucgcgcuucuucu

SEQ ID NO: 1764 - RNA, 23 nt, Artificial Sequence
  Description of Artificial Sequence: Synthetic oligonucleotide
auauaaaggcucgcgcuucuucu

SEQ ID NO: 1765 - RNA, 23 nt, Artificial Sequence
  Description of Artificial Sequence: Synthetic oligonucleotide
cagugaaaguggaagguugucca

SEQ ID NO: 1766 - RNA, 23 nt, Artificial Sequence
  Description of Artificial Sequence: Synthetic oligonucleotide
cagugaaaguggaagguugucca

SEQ ID NO: 1767 - RNA, 23 nt, Artificial Sequence
  Description of Artificial Sequence: Synthetic oligonucleotide
ccaaacagaauguauuggcgaca

SEQ ID NO: 1768 - RNA, 23 nt, Artificial Sequence
  Description of Artificial Sequence: Synthetic oligonucleotide
cagaguuucuccuaggugauggc

SEQ ID NO: 1769 - RNA, 23 nt, Artificial Sequence
  Description of Artificial Sequence: Synthetic oligonucleotide
cagaguuucuccuaggugauggc

SEQ ID NO: 1770 - RNA, 23 nt, Artificial Sequence
  Description of Artificial Sequence: Synthetic oligonucleotide
cggauguuggugauggaguuagc

SEQ ID NO: 1771 - RNA, 23 nt, Artificial Sequence
  Description of Artificial Sequence: Synthetic oligonucleotide
cggauguuggugauggaguuagc

SEQ ID NO: 1772 - RNA, 23 nt, Artificial Sequence
  Description of Artificial Sequence: Synthetic oligonucleotide
auugcugacuacggcauugcuca

SEQ ID NO: 1773 - RNA, 23 nt, Artificial Sequence
  Description of Artificial Sequence: Synthetic oligonucleotide
auucacaaacugguccuagcagc

SEQ ID NO: 1774 - RNA, 23 nt, Artificial Sequence
  Description of Artificial Sequence: Synthetic oligonucleotide
auucacaaacugguccuagcagc

SEQ ID NO: 1775 - RNA, 23 nt, Artificial Sequence
  Description of Artificial Sequence: Synthetic oligonucleotide
gugcuuagccuuggugcaucuuc

SEQ ID NO: 1776 - RNA, 23 nt, Artificial Sequence
  Description of Artificial Sequence: Synthetic oligonucleotide
uacucuccuggucaucaauaccg

SEQ ID NO: 1777 - RNA, 23 nt, Artificial Sequence
  Description of Artificial Sequence: Synthetic oligonucleotide
uacucuccuggucaucaauaccg

SEQ ID NO: 1778 - RNA, 23 nt, Artificial Sequence
  Description of Artificial Sequence: Synthetic oligonucleotide
gaugggaaaaagagacauacccu

SEQ ID NO: 1779 - RNA, 23 nt, Artificial Sequence
  Description of Artificial Sequence: Synthetic oligonucleotide
gcgugcacuuuuuaagggaggua

SEQ ID NO: 1780 - RNA, 23 nt, Artificial Sequence
  Description of Artificial Sequence: Synthetic oligonucleotide
aaaugucaugcugguauugggcu

SEQ ID NO: 1781 - RNA, 23 nt, Artificial Sequence
  Description of Artificial Sequence: Synthetic oligonucleotide
aaaugucaugcugguauugggcu

SEQ ID NO: 1782 - RNA, 23 nt, Artificial Sequence
  Description of Artificial Sequence: Synthetic oligonucleotide
aauauaaaggcucgcgcuucuuc

SEQ ID NO: 1783 - RNA, 23 nt, Artificial Sequence
  Description of Artificial Sequence: Synthetic oligonucleotide
cuuuguggaacccaaguggcuuu

SEQ ID NO: 1784 - RNA, 23 nt, Artificial Sequence
  Description of Artificial Sequence: Synthetic oligonucleotide
ccaaguuguggaccacauugauu

SEQ ID NO: 1785 - RNA, 23 nt, Artificial Sequence
  Description of Artificial Sequence: Synthetic oligonucleotide
aaccaaggcucaccauuccaaua

SEQ ID NO: 1786 - RNA, 23 nt, Artificial Sequence
  Description of Artificial Sequence: Synthetic oligonucleotide
aguuagccuccaaggguuccuug

SEQ ID NO: 1787 - RNA, 23 nt, Artificial Sequence
  Description of Artificial Sequence: Synthetic oligonucleotide
gcaaagauugcugacuacggcau

SEQ ID NO: 1788 - RNA, 23 nt, Artificial Sequence
  Description of Artificial Sequence: Synthetic oligonucleotide
gcaaagauugcugacuacggcau

SEQ ID NO: 1789 - RNA, 23 nt, Artificial Sequence
  Description of Artificial Sequence: Synthetic oligonucleotide
ggucaucaauaccgaagauggga

SEQ ID NO: 1790 - RNA, 23 nt, Artificial Sequence
  Description of Artificial Sequence: Synthetic oligonucleotide
ggucaucaauaccgaagauggga

SEQ ID NO: 1791 - RNA, 23 nt, Artificial Sequence
  Description of Artificial Sequence: Synthetic oligonucleotide
aacuggaggaggccauauuuuac

SEQ ID NO: 1792 - RNA, 23 nt, Artificial Sequence
  Description of Artificial Sequence: Synthetic oligonucleotide
aaugucaugcugguauugggcua

SEQ ID NO: 1793 - RNA, 23 nt, Artificial Sequence
  Description of Artificial Sequence: Synthetic oligonucleotide
aaugucaugcugguauugggcua

SEQ ID NO: 1794 - RNA, 23 nt, Artificial Sequence
  Description of Artificial Sequence: Synthetic oligonucleotide
ucaauauaaaggcucgcgcuucu

SEQ ID NO: 1795 - RNA, 23 nt, Artificial Sequence
  Description of Artificial Sequence: Synthetic oligonucleotide
cuccugaauaagcgaggguuccc

SEQ ID NO: 1796 - RNA, 23 nt, Artificial Sequence
  Description of Artificial Sequence: Synthetic oligonucleotide
aaaaucauggcacagauuuugac

SEQ ID NO: 1797 - RNA, 23 nt, Artificial Sequence
  Description of Artificial Sequence: Synthetic oligonucleotide
uucuuuugggccaaguuguggac

SEQ ID NO: 1798 - RNA, 23 nt, Artificial Sequence
  Description of Artificial Sequence: Synthetic oligonucleotide
uucuuuugggccaaguuguggac

SEQ ID NO: 1799 - RNA, 23 nt, Artificial Sequence
  Description of Artificial Sequence: Synthetic oligonucleotide
ggaagaaugguuuccuggguugc

SEQ ID NO: 1800 - RNA, 23 nt, Artificial Sequence
  Description of Artificial Sequence: Synthetic oligonucleotide
gaauuugaacaagcuccagaguu

SEQ ID NO: 1801 - RNA, 23 nt, Artificial Sequence
  Description of Artificial Sequence: Synthetic oligonucleotide
gauguuggugauggaguuagccu

SEQ ID NO: 1802 - RNA, 23 nt, Artificial Sequence
  Description of Artificial Sequence: Synthetic oligonucleotide
ucagccaugauuauauaccgaga

SEQ ID NO: 1803 - RNA, 23 nt, Artificial Sequence
  Description of Artificial Sequence: Synthetic oligonucleotide
ugcaaagauugcugacuacggca

SEQ ID NO: 1804 - RNA, 23 nt, Artificial Sequence
  Description of Artificial Sequence: Synthetic oligonucleotide
gggaggauguggcacaaagauuu

SEQ ID NO: 1805 - RNA, 23 nt, Artificial Sequence
  Description of Artificial Sequence: Synthetic oligonucleotide
gggaggauguggcacaaagauuu

SEQ ID NO: 1806 - protein, 13 aa, Human immunodeficiency virus 1
GRKKRRQRRRPPQ

SEQ ID NO: 1807 - protein, 16 aa, Drosophila sp.
RQIKIWFQNRRMKWKK

SEQ ID NO: 1808 - DNA, 7989 bp, Homo sapiens
ttcaaacatcataagaccggcactctctcccaaagatacaagctgtagcaaggagttttgtgcatatcagtttcccagctcatagggaagtgatgctctccatgctgatgcattcttcatcaaaggaagttttccaggcatctgcgaatgcattgtcaactctcttagaacaaaatgttaatttcagaaaaatactgttatcaaaaggaatacacctgaatgttttggagttaatgcagaagcatatacattctcctgaagtggctgaaagtggctgtaaaatgctaaatcatctttttgaaggaagcaacacttccctggatataatggcagcagtggtccccaaaatactaacagttatgaaacgtcatgagacatcattaccagtgcagctggaggcgcttcgagctattttacattttatagtgcctggcatgccagaagaatccagggaggatacagaatttcatcataagctaaatatggttaaaaaacagtgtttcaagaatgatattcacaaactggtcctagcagctttgaacaggttcattggaaatcctgggattcagaaatgtggattaaaagtaatttcttctattgtacattttcctgatgcattagagatgttatccctggaaggtgctatggattcagtgcttcacacactgcagatgtatccagatgaccaagaaattcagtgtctgggtttaagtcttataggatacttgattacaaagaagaatgtgttcataggaactggacatctgctggcaaaaattctggtttccagcttataccgatttaaggatgttgctgaaatacagactaaaggatttcagacaatcttagcaatcctcaaattgtcagcatctttttctaagctgctggtgcatcattcatttgacttagtaatattccatcaaatgtcttccaatatcatggaacaaaaggatcaacagtttctaaacctctgttgcaagtgttttgcaaaagtagctatggatgattacttaaaaaatgtgatgctagagagagcgtgtgatcagaataacagcatcatggttgaatgcttgcttctattgggagcagatgccaatcaagcaaaggagggatcttctttaatttgtcaggtatgtgagaaagagagcagtcccaaattggtggaactcttactgaatagtggatctcgtgaacaagatgtacgaaaagcgttgacgataagcattgggaaaggtgacagccagatcatcagcttgctcttaaggaggctggccctggatgtggccaacaatagcatttgccttggaggattttgtataggaaaagttgaaccttcttggcttggtcctttatttccagataagacttctaatttaaggaaacaaacaaatatagcatctacactagcaagaatggtgatcagatatcagatgaaaagtgctgtggaagaaggaacagcctcaggcagcgatggaaatttttctgaagatgtgctgtctaaatttgatgaatggacctttattcctgactcttctatggacagtgtgtttgctcaaagtgatgacctggatagtgaaggaagtgaaggctcatttcttgtgaaaaagaaatctaattcaattagtgtaggagaattttaccgagatgccgtattacagcgttgctcaccaaatttgcaaagacattccaattccttggggcccatttttgatcatgaagatttactgaagcgaaaaagaaaaatattatcttcagatgattcactcaggtcatcaaaacttcaatcccatatgaggcattcagacagcatttcttctctggcttctgagagagaatatattacatcactagacctttcagcaaatgaactaagagatattgatgccctaagccagaaatgctgtataagtgttcatttggagcatcttgaaaagctggagcttcaccagaatgcactcacgagctttccacaacagctatgtgaaactctgaagagtttgacacatttggacttgcacagtaataaatttacatcatttccttcttatttgttgaaaatgagttgtattgctaatcttgatgtctctcgaaatgacattggaccctcagtggttttagatcctacagtgaaatgtccaactctgaaacagtttaacctgtcatataaccagctgtcttttgtacctgagaacctcactgatgtggtagagaaactggagcagctcattttagaaggaaataaaatatcagggatatgctcccccttgagactgaaggaactgaagattttaaaccttagtaagaaccacatttcatccctatcagagaactttcttgaggcttgtcctaaagtggagagtttcagtgccagaatgaattttcttgctgctatgcctttcttgcctccttctatgacaatcctaaaattatctcagaacaaattttcctgtattccagaagcaattttaaatcttccacacttgcggtctttagatatgagcagcaatgatattcagtacctaccaggtcccgcacactggaaatctttgaacttaagggaactcttatttagccataatcagatcagcatcttggacttgagtgaaaaagcatatttatggtctagagtagagaaactgcatctttctcacaataaactgaaagagattcctcctgagattggctgtcttgaaaatctgacatctctggatgtcagttacaacttggaactaagatcctttcccaatgaaatggggaaattaagcaaaatatgggatcttcctttggatgaactgcatcttaactttgattttaaacatataggatgtaaagccaaagacatcataaggtttcttcaacagcgattaaaaaaggctgtgccttataaccgaatgaaacttatgattgtgggaaatactgggagtggtaaaaccaccttattgcagcaattaatgaaaaccaagaaatcagatcttggaatgcaaagtgccacagttggcatagatgtgaaagactggcctatccaaataagagacaaaagaaagagagatctcgtcctaaatgtgtgggattttgcaggtcgtgaggaattctatagtactcatccccattttatgacgcagcgagcattgtaccttgctgtctatgacctcagcaagggacaggctgaagttgatgccatgaagccttggctcttcaatataaaggctcgcgcttcttcttcccctgtgattctcgttggcacacatttggatgtttctgatgagaagcaacgcaaagcctgcatgagtaaaatcaccaaggaactcctgaataagcgagggttccctgccatacgagattaccactttgtgaatgccaccgaggaatctgatgctttggcaaaacttcggaaaaccatcataaacgagagccttaatttcaagatccgagatcagcttgttgttggacagctgattccagactgctatgtagaacttgaaaaaatcattttatcggagcgtaaaaatgtgccaattgaatttcccgtaattgaccggaaacgattattacaactagtgagagaaaatcagctgcagttagatgaaaatgagcttcctcacgcagttcactttctaaatgaatcaggagtccttcttcattttcaagacccagcactgcagttaagtgacttgtactttgtggaacccaagtggctttgtaaaatcatggcacagattttgacagtgaaagtggaaggttgtccaaaacaccctaagggcattatttcgcgtagagatgtggaaaaatttctttcaaaaaaaaggaaatttccaaagaactacatgtcacagtattttaagctcctagaaaaattccagattgctttgccaataggagaagaatatttgctggttccaagcagtttgtctgaccacaggcctgtgatagagcttccccattgtgagaactctgaaattatcatccgactatatgaaatgccttattttccaatgggattttggtcaagattaatcaatcgattacttgagatttcaccttacatgctttcagggagagaacgagcacttcgcccaaacagaatgtattggcgacaaggcatttacttaaattggtctcctgaagcttattgtctggtaggatctgaagtcttagacaatcatccagagagtttcttaaaaattacagttccttcttgtagaaaaggctgtattcttttgggccaagttgtggaccacattgattctctcatggaagaatggtttcctgggttgctggagattgatatttgtggtgaaggagaaactctgttgaagaaatgggcattatatagttttaatgatggtgaagaacatcaaaaaatcttacttgatgacttgatgaagaaagcagaggaaggagatctcttagtaaatccagatcaaccaaggctcaccattccaatatctcagattgcccctgacttgattttggctgacctgcctagaaatattatgttgaataatgatgagttggaatttgaacaagctccagagtttctcctaggtgatggcagttttggatcagtttaccgagcagcctatgaaggagaagaagtggctgtgaagatttttaataaacatacatcactcaggctgttaagacaagagcttgtggtgctttgccacctccaccaccccagtttgatatctttgctggcagctgggattcgtccccggatgttggtgatggagttagcctccaagggttccttggatcgcctgcttcagcaggacaaagccagcctcactagaaccctacagcacaggattgcactccacgtagctgatggtttgagatacctccactcagccatgattatataccgagacctgaaaccccacaatgtgctgcttttcacactgtatcccaatgctgccatcattgcaaagattgctgactacggcattgctcagtactgctgtagaatggggataaaaacatcagagggcacaccagggtttcgtgcacctgaagttgccagaggaaatgtcatttataaccaacaggctgatgtttattcatttggtttactactctatgacattttgacaactggaggtagaatagtagagggtttgaagtttccaaatgagtttgatgaattagaaatacaaggaaaattacctgatccagttaaagaatatggttgtgccccatggcctatggttgagaaattaattaaacagtgtttgaaagaaaatcctcaagaaaggcctacttctgcccaggtctttgacattttgaattcagctgaattagtctgtctgacgagacgcattttattacctaaaaacgtaattgttgaatgcatggttgctacacatcacaacagcaggaatgcaagcatttggctgggctgtgggcacaccgacagaggacagctctcatttcttgacttaaatactgaaggatacacttctgaggaagttgctgatagtagaatattgtgcttagccttggtgcatcttcctgttgaaaaggaaagctggattgtgtctgggacacagtctggtactctcctggtcatcaataccgaagatgggaaaaagagacataccctagaaaagatgactgattctgtcacttgtttgtattgcaattccttttccaagcaaagcaaacaaaaaaattttcttttggttggaaccgctgatggcaagttagcaatttttgaagataagactgttaagcttaaaggagctgctcctttgaagatactaaatataggaaatgtcagtactccattgatgtgtttgagtgaatccacaaattcaacggaaagaaatgtaatgtggggaggatgtggcacaaagattttctccttttctaatgatttcaccattcagaaactcattgagacaagaacaagccaactgttttcttatgcagctttcagtgattccaacatcataacagtggtggtagacactgctctctatattgctaagcaaaatagccctgttgtggaagtgtgggataagaaaactgaaaaactctgtggactaatagactgcgtgcactttttaagggaggtaatggtaaaagaaaacaaggaatcaaaacacaaaatgtcttattctgggagagtgaaaaccctctgccttcagaagaacactgctctttggataggaactggaggaggccatattttactcctggatctttcaactcgtcgacttatacgtgtaatttacaacttttgtaattcggtcagagtcatgatgacagcacagctaggaagccttaaaaatgtcatgctggtattgggctacaaccggaaaaatactgaaggtacacaaaagcagaaagagatacaatcttgcttgaccgtttgggacatcaatcttccacatgaagtgcaaaatttagaaaaacacattgaagtgagaaaagaattagctgaaaaaatgagacgaacatctgttgagtaagagagaaataggaattgtctttggataggaaaattattctctcctcttgtaaatatttattttaaaaatgttcacatggaaagggtactcacattttttgaaatagctcgtgtgtatgaaggaatgttattatttttaatttaaatatatgtaaaaatacttaccagtaaatgtgtattttaaagaactatttaaaacacaatgttatatttcttataaataccagttactttcgttcattaattaatgaaaataaatctgtgaagtacctaatttaagtactcatactaaaatttataaggccgataattttttgttttcttgtctgtaatggaggtaaactttattttaaattctgtgcttaagacaggactattgcttgtcgatttttctagaaatctgcacggtataatgaaaatattaagacagtttcccatgtaatgtattccttcttagattgcatcgaaatgcactatcatatatgcttgtaaatattcaaatgaatttgcactaataaagtcctttgttggtatgtgaattctctttgttgctgttgcaaacagtgcatcttacacaacttcactcaattcaaaagaaaactccattaaaagtactaatgaaaaaacatgacatactgtcaaagtcctcatatctaggaaagacacagaaactctctttgtcacagaaactctctgtgtctttcctagacataatagagttgtttttcaactctatgtttgaatgtggataccctgaattttgtataattagtgtaaatacagtgttcagtccttcaagtgatatttttatttttttattcataccactagctacttgttttctaatctgcttcattctaatgcttatattcatcttttccctaaatttgtgatgctgcagatcctacatcattcagatagaaacctttttttttttcagaattatagaattccacagctcctaccaagaccatgaggataaatatctaacacttttcagttgctgaaggagaaaggagctttagttatgatggataaaaatatctgccaccctaggcttccaaattatacttaaattgtttacatagcttaccacaataggagtatcagggccaaatacctatgtaataatttgaggtcatttctgctttaggaaaagtactttcggtaaattctttggccctgaccagtattcattatttcagataattccctgtgataggacaactagtacatttaatattctcagaacttatggcattttactatgtgaaaactttaaatttatttatattaagggtaatcaaattcttaaagatgaaagattttctgtattttaaaggaagctatgctttaacttgttatgtaattaacaaaaaaatcatatataatagagctctttgttccagtgttatctctttcattgttactttgtatttgcaattttttttaccaaagacaaattaaaaaaatgaataccatatttaaatggaataataaaggttttttaaaaactt

SEQ ID NO: 1809 - DNA, 7989 bp, Homo sapiens
cttccctatgagctgggaaactgatatgcacaaaactccttgctacagcttgtatctttgggagagagtgccggtcttatgatgtttgaataacattttgttctaagagagttgacaatgcattcgcagatgcctggaaaacttcctttgatgaagaatgcatcagcatggagagcatcatttcagccacttcaggagaatgtatatgcttctgcattaactccaaaacattcaggtgtattccttttgataacagtatttttctgaaattaactgttagtattttggggaccactgctgccattatatccagggaagtgttgcttccttcaaaaagatgatttagcattttacagccactggattcttctggcatgccaggcactataaaatgtaaaatagctcgaagcgcctccagctgcactggtaatgatgtctcatgacgtttcatcaaagctgctaggaccagtttgtgaatatcattcttgaaacactgttttttaaccatatttagcttatgatgaaattctgtatcctcccataacatctctaatgcatcaggaaaatgtacaatagaagaaattacttttaatccacatttctgaatcccaggatttccaatgaacctgtctataagacttaaacccagacactgaatttcttggtcatctggatacatctgcagtgtgtgaagcactgaatccatagcaccttccagggcatccttaaatcggtataagctggaaaccagaatttttgccagcagatgtccagttcctatgaacacattcttctttgtaatcaagtatcatgaatgatgcaccagcagcttagaaaaagatgctgacaatttgaggattgctaagattgtctgaaatcctttagtctgtatttcagcaattgcaaaacacttgcaacagaggtttagaaactgttgatccttttgttccatgatattggaagacatttgatggaatattactaagtcaaatagaagcaagcattcaaccatgatgctgttattctgatcacacgctctctctagcatcacattttttaagtaatcatccatagctacttagagttccaccaatttgggactgctctctttctcacatacctgacaaattaaagaagatccctcctttgcttgattggcatctgctcccaagagcaagctgatgatctggctgtcacctttcccaatgcttatcgtcaacgcttttcgtacatcttgttcacgagatccactattcagtaaaggaccaagccaagaaggttcaacttttcctatacaaaatcctccaaggcaaatgctattgttggccacatccagggccagcctccttacacttttcatctgatatctgatcaccattcttgctagtgtagatgctatatttgtttgtttccttaaattagaagtcttatctggaaataagtcaggaataaaggtccattcatcaaatttagacagcacatcttcagaaaaatttccatcgctgcctgaggctgttccttcttccacagttgaattagatttctttttcacaagaaatgagccttcacttccttcactatccaggtcatcactttgagcaaacacactgtccatagaagcaaaaatgggccccaaggaattggaatgtctttgcaaatttggtgagcaacgctgtaatacggcatctcggtaaaattctcctacactaaaatgcctcatatgggattgaagttttgatgacctgagtgaatcatctgaagataatatttttctttttcgcttcagtaaatcttcatgatttagggcatcaatatctcttagttcatttgctgaaaggtctagtgatgtaatatattctctctcagaagccagagaagaaatgctgtctgatagctgttgtggaaagctcgtgagtgcattctggtgaagctccagcttttcaagatgctccaaatgaacacttatacagcatttctggccaatacaactcattttcaacaaataagaaggaaatgatgtaaatttattactgtgcaagtccaaatgtgtcaaactcttcagagtttcacacaggttaaactgtttcagagttggacatttcactgtaggatctaaaaccactgagggtccaatgtcatttcgagagacatcaagattagctgatattttatttccttctaaaatgagctgctccagtttctctaccacatcagtgaggttctcaggtacaaaagacagctggttatatgcctcaagaaagttctctgatagggatgaaatgtggttcttactaaggtttaaaatcttcagttccttcagtctcaagggggagcatatccataattttaggattgtcatagaaggaggcaagaaaggcatagcagcaagaaaattcattctggcactgaaactctccactttaggacaagggtactgaatatcattgctgctcatatctaaagaccgcaagtgtggaagatttaaaattgcttctggaatacaggaaaatttgttctgagctttttcactcaagtccaagatgctgatctgattatggctaaataagagttcccttaagttcaaagatttccagtgtgcgggacctggtatcagattttcaagacagccaatctcaggaggaatctctttcagtttattgtgagaaagatgcagtttctctactctagaccataaatatgcatccaaaggaagatcccatattttgcttaatttccccatttcattgggaaaggatcttagttccaagttgtaactgacatccagagatggcacagccttttttaatcgctgttgaagaaaccttatgatgtctttggctttacatcctatatgtttaaaatcaaagttaagatgcagttctgatttcttggttttcattaattgctgcaataaggtggttttaccactcccagtatttcccacaatcataagtttcattcggttataagttaggacgagatctctctttcttttgtctcttatttggataggccagtctttcacatctatgccaactgtggcactttgcattccaagatggtcatagacagcaaggtacaatgctcgctgcgtcataaaatggggatgagtactatagaattcctcacgacctgcaaaatcccacacatcaacgagaatcacaggggaagaagaagcgcgagcctttatattgaagagccaaggcttcatggcatcaacttcagcctgtcccttgctgacagggaaccctcgcttattcaggagttccttggtgattttactcatgcaggctttgcgttgcttctcatcagaaacatccaaatgtgtgcaattaaggctctcgtttatgatggttttccgaagttttgccaaagcatcagattcctcggtggcattcacaaagtggtaatctcgtatggcatttttacgctccgataaaatgattttttcaagttctacatagcagtctggaatcagctgtccaacaacaagctgatctcggatcttgagaggaagctcattttcatctaactgcagctgattttctctcactagttgtaataatcgtttccggtcaattacgggaaattcaattggcatgggttccacaaagtacaagtcacttaactgcagtgctgggtcttgaaaatgaagaaggactcctgattcatttagaaagtgaactgcgtcatctctacgcgaaataatgcccttagggtgttttggacaaccttccactttcactgtcaaaatctgtgccatgattttacaaagccactgcaaagcaatctggaatttttctaggagcttaaaatactgtgacatgtagttctttggaaatttccttttttttgaaagaaatttttccataatttcagagttctcacaatggggaagctctatcacaggcctgtggtcagacaaactgcttggaaccagcaaatattcttctcctattgaaagcatgtaaggtgaaatctcaagtaatcgattgattaatcttgaccaaaatcccattggaaaataaggcatttcatatagtcggatgactaccagacaataagcttcaggagaccaatttaagtaaatgccttgtcgccaatacattctgtttgggcgaagtgctcgttctctccctgcaacttggcccaaaagaatacagccttttctacaagaaggaactgtaatttttaagaaactctctggatgattgtctaagacttcagatcatttcttcaacagagtttctccttcaccacaaatatcaatctccagcaacccaggaaaccattcttccatgagagaatcaatgtggtccactaagagatctccttcctctgctttcttcatcaagtcatcaagtaagattttttgatgttcttcaccatcattaaaactatataatgccctcaacataatatttctaggcaggtcagccaaaatcaagtcaggggcaatctgagatattggaatggtgagccttggttgatctggatttactccttcataggctgctcggtaaactgatccaaaactgccatcacctaggagaaactctggagcttgttcaaattccaactcatcattattggggtggtggaggtggcaaagcaccacaagctcttgtcttaacagcctgagtgatgtatgtttattaaaaatcttcacagccacttcttgctgaagcaggcgatccaaggaacccttggaggctaactccatcaccaacatccggggacgaatcccagctgccagcaaagatatcaaactaatcatggctgagtggaggtatctcaaaccatcagctacgtggagtgcaatcctgtgctgtagggttctagtgaggctggctttgtcctcaatgccgtagtcagcaatctttgcaatgatggcagcattgggatacagtgtgaaaagcagcacattgtggggtttcaggtctcggtatatataaatgacatttcctctggcaacttcaggtgcacgaaaccctggtgtgccctctgatgtttttatccccattctacagcagtactgagttggaaacttcaaaccctctactattctacctccagttgtcaaaatgtcatagagtagtaaaccaaatgaataaacatcagcctgttggtttaatttctcaaccataggccatggggcacaaccatattctttaactggatcaggtaattttccttgtatttctaattcatcaaactcattcagacagactaattcagctgaattcaaaatgtcaaagacctgggcagaagtaggcctttcttgaggattttctttcaaacactgtttaaagcccagccaaatgcttgcattcctgctgttgtgatgtgtagcaaccatgcattcaacaattacgtttttaggtaataaaatgcgtctcgacaatattctactatcagcaacttcctcagaagtgtatccttcagtatttaagtcaagaaatgagagctgtcctctgtcggtgtgcccaccttcggtattgatgaccaggagagtaccagactgtgtcccagacacaatccagctttccttttcaacaggaagatgcaccaaggctaagcttttttgtttgctttgcttggaaaaggaattgcaatacaaacaagtgacagaatcagtcatcttttctagggtatgtctctttttcccatgtatcttcaaaggagcagctcctttaagcttaacagtcttatcttcaaaaattgctaacttgccatcagcggttccaaccaaaagaaaattgccacatcctccccacattacatttctttccgttgaatttgtggattcactcaaacacatcaatggagtactgacatttcctatatttacactgaaagctgcataagaaaacagttggcttgttcttgtctcaatgagtttctgaatggtgaaatcattagaaaaggagaaaatctttgcagttttcttatcccacacttccacaacagggctattttgcttagcaatatagagagcagtgtctaccaccactgttatgatgttggaataataagacattttgtgttttgattccttgttttcttttaccattacctcccttaaaaagtgcacgcagtctattagtccacagagtttttttgaaagatccaggagtaaaatatggcctcctccagttcctatccaaagagcagtgttcttctgaaggcagagggttttcactctcccaggcatgacatttttaaggcttcctagctgtgctgtcatcatgactctgaccgaattacaaaagttgtaaattacacgtataagtcgacgaggaagattgatgtcccaaacggtcaagcaagattgtatctctttctgcttttgtgtaccttcagtatttttccggttgtagcccaataccattctctcttactcaacagatgttcgtctcattttttcagctaattcttttctcacttcaatgtgtttttctaaattttgcacttcatgtgaaaatgtgagtaccctttccatgtgaacatttttaaaataaatatttacaagaggagagaataattttcctatccaaagacaattcctatttctttaaaatacacatttactggtaagtatttttacatatatttaaattaaaaataataacattccttcatacacacgagctatttcaataaattaggtacttcacagatttattttcattaattaatgaacgaaagtaactggtatttataagaaatataacattgtgttttaaatagtcttaagcacagaatttaaaataaagtttacctccattacagacaagaaaacaaaaaattatcggccttataaattttagtatgagtacttctaagaaggaatacattacatgggaaactgtcttaatattttcattataccgtgcagatttctagaaaaatcgacaagcaatagtcctgcaaagagaattcacataccaacaaaggactttattagtgcaaattcatttgaatatttacaagcatatatgatagtgcatttcgatgcaacagtatgtcatgttttttcattagtacttttaatggagttttcttttgaattgagtgaagttgtgtaagatgcactgtttgcaacagcaagaaaaacaactctattatgtctaggaaagacacagagagtttctgtgacaaagagagtttctgtgtctttcctagatatgaggactttgataaaaaaataaaaatatcacttgaaggactgaacactgtatttacactaattatacaaaattcagggtatccacattcaaacatagagttgtaggatctgcagcatcacaaatttagggaaaagatgaatataagcattagaatgaagcagattagaaaacaagtagctagtggtatgaagaaaagtgttagatatttatcctcatggtcttggtaggagctgtggaattctataattctgaaaaaaaaaaaggtttctatctgaatgatctatgtaaacaatttaagtataatttggaagcctagggtggcagatatttttatccatcataactaaagctcctttctccttcagcaactaaagaatttaccgaaagtacttttcctaaagcagaaatgacctcaaattattacataggtatttggccctgatactcctattgtggtaagtagtaaaatgccataagttctgagaatattaaatgtactagttgtcctatcacagggaattatctgaaataatgaatactggtcagggccgttaaagcatagcttcctttaaaatacagaaaatctttcatctttaagaatttgattacccttaatataaataaatttaaagttttcacaaaaaattgcaaatacaaagtaacaatgaaagagataacactggaacaaagagctctattatatatgatttttttgttaattacataacaaaagtttttaaaaaacctttattattccatttaaatatggtattcatttttttaatttgtctttggtaaa

SEQ ID NO: 1810 - RNA, 21 nt, Artificial Sequence
  Description of Artificial Sequence: Synthetic oligonucleotide
cuuguuuguauugcaauucca

SEQ ID NO: 1811 - RNA, 21 nt, Artificial Sequence
  Description of Artificial Sequence: Synthetic oligonucleotide
gaaagagauacaaucuugcua

SEQ ID NO: 1812 - RNA, 21 nt, Artificial Sequence
  Description of Artificial Sequence: Synthetic oligonucleotide
caugaagugcaaaauuuagaa

SEQ ID NO: 1813 - RNA, 21 nt, Artificial Sequence
  Description of Artificial Sequence: Synthetic oligonucleotide
aaacacaaaaugucuuauuca

SEQ ID NO: 1814 - RNA, 21 nt, Artificial Sequence
  Description of Artificial Sequence: Synthetic oligonucleotide
acuccauugauguguuugaga

SEQ ID NO: 1815 - RNA, 21 nt, Artificial Sequence
  Description of Artificial Sequence: Synthetic oligonucleotide
uaaaucuuccacacuugcgga

SEQ ID NO: 1816 - RNA, 21 nt, Artificial Sequence
  Description of Artificial Sequence: Synthetic oligonucleotide
gcugaauuagucugucugaca

SEQ ID NO: 1817 - RNA, 21 nt, Artificial Sequence
  Description of Artificial Sequence: Synthetic oligonucleotide
cucagccaugauuauauacca

SEQ ID NO: 1818 - RNA, 21 nt, Artificial Sequence
  Description of Artificial Sequence: Synthetic oligonucleotide
cucagccaugauuauauacca

SEQ ID NO: 1819 - RNA, 21 nt, Artificial Sequence
  Description of Artificial Sequence: Synthetic oligonucleotide
uccaaagaacuacaugucaca

SEQ ID NO: 1820 - RNA, 21 nt, Artificial Sequence
  Description of Artificial Sequence: Synthetic oligonucleotide
uggaucuuucaacucgucgaa

SEQ ID NO: 1821 - RNA, 21 nt, Artificial Sequence
  Description of Artificial Sequence: Synthetic oligonucleotide
cugccuagaaauauuauguua

SEQ ID NO: 1822 - RNA, 21 nt, Artificial Sequence
  Description of Artificial Sequence: Synthetic oligonucleotide
uaagggaacucuuauuuagca

SEQ ID NO: 1823 - RNA, 21 nt, Artificial Sequence
  Description of Artificial Sequence: Synthetic oligonucleotide
cuggaucuuucaacucgucga

SEQ ID NO: 1824 - RNA, 21 nt, Artificial Sequence
  Description of Artificial Sequence: Synthetic oligonucleotide
cucugaaauuaucauccgaca

SEQ ID NO: 1825 - RNA, 21 nt, Artificial Sequence
  Description of Artificial Sequence: Synthetic oligonucleotide
cagcugaauuagucugucuga

SEQ ID NO: 1826 - RNA, 21 nt, Artificial Sequence
  Description of Artificial Sequence: Synthetic oligonucleotide
cuuguuuguauugcaauucca

SEQ ID NO: 1827 - RNA, 21 nt, Artificial Sequence
  Description of Artificial Sequence: Synthetic oligonucleotide
aaucaggaguccuucuucaua

SEQ ID NO: 1828 - RNA, 21 nt, Artificial Sequence
  Description of Artificial Sequence: Synthetic oligonucleotide
gcucaccauuccaauaucuca

SEQ ID NO: 1829 - RNA, 21 nt, Artificial Sequence
  Description of Artificial Sequence: Synthetic oligonucleotide
caaucuuccacaugaagugca

SEQ ID NO: 1830 - RNA, 21 nt, Artificial Sequence
  Description of Artificial Sequence: Synthetic oligonucleotide
aaacacaaaaugucuuauuca

SEQ ID NO: 1831 - RNA, 21 nt, Artificial Sequence
  Description of Artificial Sequence: Synthetic oligonucleotide
ccuggaucuuucaacucguca

SEQ ID NO: 1832 - RNA, 21 nt, Artificial Sequence
  Description of Artificial Sequence: Synthetic oligonucleotide
cuacucuaugacauuuugaca

SEQ ID NO: 1833 - RNA, 21 nt, Artificial Sequence
  Description of Artificial Sequence: Synthetic oligonucleotide
gccuuggugcaucuuccugua

SEQ ID NO: 1834 - RNA, 21 nt, Artificial Sequence
  Description of Artificial Sequence: Synthetic oligonucleotide
uugcugcuaugccuuucuuga

SEQ ID NO: 1835 - RNA, 21 nt, Artificial Sequence
  Description of Artificial Sequence: Synthetic oligonucleotide
agugagaaaagaauuagcuga

SEQ ID NO: 1836 - RNA, 21 nt, Artificial Sequence
  Description of Artificial Sequence: Synthetic oligonucleotide
agaucucuuaguaaauccaga

SEQ ID NO: 1837 - RNA, 21 nt, Artificial Sequence
  Description of Artificial Sequence: Synthetic oligonucleotide
cacaaugugcugcuuuucaca

SEQ ID NO: 1838 - RNA, 21 nt, Artificial Sequence
  Description of Artificial Sequence: Synthetic oligonucleotide
gaauucagcugaauuagucua

SEQ ID NO: 1839 - RNA, 21 nt, Artificial Sequence
  Description of Artificial Sequence: Synthetic oligonucleotide
ccauucagaaacucauugaga

SEQ ID NO: 1840 - RNA, 21 nt, Artificial Sequence
  Description of Artificial Sequence: Synthetic oligonucleotide
acaugaagugcaaaauuuaga

SEQ ID NO: 1841 - RNA, 21 nt, Artificial Sequence
  Description of Artificial Sequence: Synthetic oligonucleotide
ugcugcuaugccuuucuugca

SEQ ID NO: 1842 - RNA, 21 nt, Artificial Sequence
  Description of Artificial Sequence: Synthetic oligonucleotide
gggaaaaagagacauacccua

SEQ ID NO: 1843 - RNA, 21 nt, Artificial Sequence
  Description of Artificial Sequence: Synthetic oligonucleotide
cauuccaauaucucagauuga

SEQ ID NO: 1844 - RNA, 21 nt, Artificial Sequence
  Description of Artificial Sequence: Synthetic oligonucleotide
auguguuugagugaauccaca

SEQ ID NO: 1845 - RNA, 21 nt, Artificial Sequence
  Description of Artificial Sequence: Synthetic oligonucleotide
aaaauauuaagacaguuucca

SEQ ID NO: 1846 - RNA, 21 nt, Artificial Sequence
  Description of Artificial Sequence: Synthetic oligonucleotide
cauuccaauaucucagauuga

SEQ ID NO: 1847 - RNA, 21 nt, Artificial Sequence
  Description of Artificial Sequence: Synthetic oligonucleotide
gaagcuuauugucugguagga

SEQ ID NO: 1848 - RNA, 21 nt, Artificial Sequence
  Description of Artificial Sequence: Synthetic oligonucleotide
caguacuccauugauguguua

SEQ ID NO: 1849 - RNA, 21 nt, Artificial Sequence
  Description of Artificial Sequence: Synthetic oligonucleotide
aguuuaaccugucauauaaca

SEQ ID NO: 1850 - RNA, 21 nt, Artificial Sequence
  Description of Artificial Sequence: Synthetic oligonucleotide
gaccugccuagaaauauuaua

SEQ ID NO: 1851 - RNA, 21 nt, Artificial Sequence
  Description of Artificial Sequence: Synthetic oligonucleotide
guagaggguuugaaguuucca

SEQ ID NO: 1852 - RNA, 21 nt, Artificial Sequence
  Description of Artificial Sequence: Synthetic oligonucleotide
gaaagagauacaaucuugcua

SEQ ID NO: 1853 - RNA, 21 nt, Artificial Sequence
  Description of Artificial Sequence: Synthetic oligonucleotide
ccuggaucuuucaacucguca

SEQ ID NO: 1854 - RNA, 21 nt, Artificial Sequence
  Description of Artificial Sequence: Synthetic oligonucleotide
uuugagugaauccacaaauua

SEQ ID NO: 1855 - RNA, 21 nt, Artificial Sequence
  Description of Artificial Sequence: Synthetic oligonucleotide
cuuguuuguauugcaauucca

SEQ ID NO: 1856 - RNA, 21 nt, Artificial Sequence
  Description of Artificial Sequence: Synthetic oligonucleotide
gaaagagauacaaucuugcua

SEQ ID NO: 1857 - RNA, 21 nt, Artificial Sequence
  Description of Artificial Sequence: Synthetic oligonucleotide
caugaagugcaaaauuuagaa

SEQ ID NO: 1858 - RNA, 21 nt, Artificial Sequence
  Description of Artificial Sequence: Synthetic oligonucleotide
aaacacaaaaugucuuauuca

SEQ ID NO: 1859 - RNA, 21 nt, Artificial Sequence
  Description of Artificial Sequence: Synthetic oligonucleotide
acuccauugauguguuugaga

SEQ ID NO: 1860 - RNA, 21 nt, Artificial Sequence
  Description of Artificial Sequence: Synthetic oligonucleotide
uaaaucuuccacacuugcgga

SEQ ID NO: 1861 - RNA, 21 nt, Artificial Sequence
  Description of Artificial Sequence: Synthetic oligonucleotide
gcugaauuagucugucugaca

SEQ ID NO: 1862 - RNA, 21 nt, Artificial Sequence
  Description of Artificial Sequence: Synthetic oligonucleotide
cucagccaugauuauauacca

SEQ ID NO: 1863 - RNA, 21 nt, Artificial Sequence
  Description of Artificial Sequence: Synthetic oligonucleotide
cucagccaugauuauauacca

SEQ ID NO: 1864 - RNA, 21 nt, Artificial Sequence
  Description of Artificial Sequence: Synthetic oligonucleotide
uccaaagaacuacaugucaca

SEQ ID NO: 1865 - RNA, 21 nt, Artificial Sequence
  Description of Artificial Sequence: Synthetic oligonucleotide
uggaucuuucaacucgucgaa

SEQ ID NO: 1866 - RNA, 21 nt, Artificial Sequence
  Description of Artificial Sequence: Synthetic oligonucleotide
cugccuagaaauauuauguua

SEQ ID NO: 1867 - RNA, 21 nt, Artificial Sequence
  Description of Artificial Sequence: Synthetic oligonucleotide
uaagggaacucuuauuuagca

SEQ ID NO: 1868 - RNA, 21 nt, Artificial Sequence
  Description of Artificial Sequence: Synthetic oligonucleotide
cuggaucuuucaacucgucga

SEQ ID NO: 1869 - RNA, 21 nt, Artificial Sequence
  Description of Artificial Sequence: Synthetic oligonucleotide
cucugaaauuaucauccgaca

SEQ ID NO: 1870 - RNA, 21 nt, Artificial Sequence
  Description of Artificial Sequence: Synthetic oligonucleotide
cagcugaauuagucugucuga

SEQ ID NO: 1871 - RNA, 21 nt, Artificial Sequence
  Description of Artificial Sequence: Synthetic oligonucleotide
cuuguuuguauugcaauucca

SEQ ID NO: 1872 - RNA, 21 nt, Artificial Sequence
  Description of Artificial Sequence: Synthetic oligonucleotide
aaucaggaguccuucuucaua

SEQ ID NO: 1873 - RNA, 21 nt, Artificial Sequence
  Description of Artificial Sequence: Synthetic oligonucleotide
gcucaccauuccaauaucuca

SEQ ID NO: 1874 - RNA, 21 nt, Artificial Sequence
  Description of Artificial Sequence: Synthetic oligonucleotide
caaucuuccacaugaagugca

SEQ ID NO: 1875 - RNA, 21 nt, Artificial Sequence
  Description of Artificial Sequence: Synthetic oligonucleotide
aaacacaaaaugucuuauuca

SEQ ID NO: 1876 - RNA, 21 nt, Artificial Sequence
  Description of Artificial Sequence: Synthetic oligonucleotide
ccuggaucuuucaacucguca

SEQ ID NO: 1877 - RNA, 21 nt, Artificial Sequence
  Description of Artificial Sequence: Synthetic oligonucleotide
cuacucuaugacauuuugaca

SEQ ID NO: 1878 - RNA, 21 nt, Artificial Sequence
  Description of Artificial Sequence: Synthetic oligonucleotide
gccuuggugcaucuuccugua

SEQ ID NO: 1879 - RNA, 21 nt, Artificial Sequence
  Description of Artificial Sequence: Synthetic oligonucleotide
uugcugcuaugccuuucuuga

SEQ ID NO: 1880 - RNA, 21 nt, Artificial Sequence
  Description of Artificial Sequence: Synthetic oligonucleotide
agugagaaaagaauuagcuga

SEQ ID NO: 1881 - RNA, 21 nt, Artificial Sequence
  Description of Artificial Sequence: Synthetic oligonucleotide
agaucucuuaguaaauccaga

SEQ ID NO: 1882 - RNA, 21 nt, Artificial Sequence
  Description of Artificial Sequence: Synthetic oligonucleotide
cacaaugugcugcuuuucaca

SEQ ID NO: 1883 - RNA, 21 nt, Artificial Sequence
  Description of Artificial Sequence: Synthetic oligonucleotide
gaauucagcugaauuagucua

SEQ ID NO: 1884 - RNA, 21 nt, Artificial Sequence
  Description of Artificial Sequence: Synthetic oligonucleotide
ccauucagaaacucauugaga

SEQ ID NO: 1885 - RNA, 21 nt, Artificial Sequence
  Description of Artificial Sequence: Synthetic oligonucleotide
acaugaagugcaaaauuuaga

SEQ ID NO: 1886 - RNA, 21 nt, Artificial Sequence
  Description of Artificial Sequence: Synthetic oligonucleotide
ugcugcuaugccuuucuugca

SEQ ID NO: 1887 - RNA, 21 nt, Artificial Sequence
  Description of Artificial Sequence: Synthetic oligonucleotide
gggaaaaagagacauacccua

SEQ ID NO: 1888 - RNA, 21 nt, Artificial Sequence
  Description of Artificial Sequence: Synthetic oligonucleotide
cauuccaauaucucagauuga

SEQ ID NO: 1889 - RNA, 21 nt, Artificial Sequence
  Description of Artificial Sequence: Synthetic oligonucleotide
auguguuugagugaauccaca

SEQ ID NO: 1890 - RNA, 21 nt, Artificial Sequence
  Description of Artificial Sequence: Synthetic oligonucleotide
aaaauauuaagacaguuucca

SEQ ID NO: 1891 - RNA, 21 nt, Artificial Sequence
  Description of Artificial Sequence: Synthetic oligonucleotide
cauuccaauaucucagauuga

SEQ ID NO: 1892 - RNA, 21 nt, Artificial Sequence
  Description of Artificial Sequence: Synthetic oligonucleotide
gaagcuuauugucugguagga

SEQ ID NO: 1893 - RNA, 21 nt, Artificial Sequence
  Description of Artificial Sequence: Synthetic oligonucleotide
caguacuccauugauguguua

SEQ ID NO: 1894 - RNA, 21 nt, Artificial Sequence
  Description of Artificial Sequence: Synthetic oligonucleotide
aguuuaaccugucauauaaca

SEQ ID NO: 1895 - RNA, 21 nt, Artificial Sequence
  Description of Artificial Sequence: Synthetic oligonucleotide
gaccugccuagaaauauuaua

SEQ ID NO: 1896 - RNA, 21 nt, Artificial Sequence
  Description of Artificial Sequence: Synthetic oligonucleotide
guagaggguuugaaguuucca

SEQ ID NO: 1897 - RNA, 21 nt, Artificial Sequence
  Description of Artificial Sequence: Synthetic oligonucleotide
gaaagagauacaaucuugcua

SEQ ID NO: 1898 - RNA, 21 nt, Artificial Sequence
  Description of Artificial Sequence: Synthetic oligonucleotide
ccuggaucuuucaacucguca

SEQ ID NO: 1899 - RNA, 21 nt, Artificial Sequence
  Description of Artificial Sequence: Synthetic oligonucleotide
uuugagugaauccacaaauua

SEQ ID NO: 1900 - DNA, 23 bp, Artificial Sequence
  Description of Artificial Sequence: Synthetic oligonucleotide
  Description of Combined DNA/RNA Molecule: Synthetic oligonucleotide
uggaautgcaauacaaacaagug

SEQ ID NO: 1901 - DNA, 23 bp, Artificial Sequence
  Description of Artificial Sequence: Synthetic oligonucleotide
  Description of Combined DNA/RNA Molecule: Synthetic oligonucleotide
uagcaagauugtaucucuuucug

SEQ ID NO: 1902 - DNA, 23 bp, Artificial Sequence
  Description of Artificial Sequence: Synthetic oligonucleotide
  Description of Combined DNA/RNA Molecule: Synthetic oligonucleotide
utcuaaauuuugcacuucaugug

SEQ ID NO: 1903 - DNA, 23 bp, Artificial Sequence
  Description of Artificial Sequence: Synthetic oligonucleotide
  Description of Combined DNA/RNA Molecule: Synthetic oligonucleotide
ugaataagacatuuuguguuuug

SEQ ID NO: 1904 - DNA, 23 bp, Artificial Sequence
  Description of Artificial Sequence: Synthetic oligonucleotide
  Description of Combined DNA/RNA Molecule: Synthetic oligonucleotide
ucucaaacacatcaauggaguac

SEQ ID NO: 1905 - RNA, 23 nt, Artificial Sequence
  Description of Artificial Sequence: Synthetic oligonucleotide
uccgcaaguguggaagauuuaaa

SEQ ID NO: 1906 - RNA, 23 nt, Artificial Sequence
  Description of Artificial Sequence: Synthetic oligonucleotide
ugucagacagacuaauucagcug

SEQ ID NO: 1907 - RNA, 23 nt, Artificial Sequence
  Description of Artificial Sequence: Synthetic oligonucleotide
ugguauauaaucauggcugagug

SEQ ID NO: 1908 - RNA, 23 nt, Artificial Sequence
  Description of Artificial Sequence: Synthetic oligonucleotide
ugguauauaaucauggcugagug

SEQ ID NO: 1909 - RNA, 23 nt, Artificial Sequence
  Description of Artificial Sequence: Synthetic oligonucleotide
ugugacauguaguucuuuggaaa

SEQ ID NO: 1910 - DNA, 23 bp, Artificial Sequence
  Description of Artificial Sequence: Synthetic oligonucleotide
  Description of Combined DNA/RNA Molecule: Synthetic oligonucleotide
utcgacgaguugaaagauccagg

SEQ ID NO: 1911 - DNA, 23 bp, Artificial Sequence
  Description of Artificial Sequence: Synthetic oligonucleotide
  Description of Combined DNA/RNA Molecule: Synthetic oligonucleotide
uaacauaauautucuaggcaggu

SEQ ID NO: 1912 - RNA, 23 nt, Artificial Sequence
  Description of Artificial Sequence: Synthetic oligonucleotide
ugcuaaauaagaguucccuuaag

SEQ ID NO: 1913 - RNA, 23 nt, Artificial Sequence
  Description of Artificial Sequence: Synthetic oligonucleotide
ucgacgaguugaaagauccagga

SEQ ID NO: 1914 - RNA, 23 nt, Artificial Sequence
  Description of Artificial Sequence: Synthetic oligonucleotide
ugucggaugauaauuucagaguu

SEQ ID NO: 1915 - RNA, 23 nt, Artificial Sequence
  Description of Artificial Sequence: Synthetic oligonucleotide
ucagacagacuaauucagcugaa

SEQ ID NO: 1916 - DNA, 23 bp, Artificial Sequence
  Description of Artificial Sequence: Synthetic oligonucleotide
  Description of Combined DNA/RNA Molecule: Synthetic oligonucleotide
uggaautgcaatacaaacaagug

SEQ ID NO: 1917 - RNA, 23 nt, Artificial Sequence
  Description of Artificial Sequence: Synthetic oligonucleotide
uaugaagaaggacuccugauuca

SEQ ID NO: 1918 - RNA, 23 nt, Artificial Sequence
  Description of Artificial Sequence: Synthetic oligonucleotide
ugagauauuggaauggugagccu

SEQ ID NO: 1919 - DNA, 23 bp, Artificial Sequence
  Description of Artificial Sequence: Synthetic oligonucleotide
  Description of Combined DNA/RNA Molecule: Synthetic oligonucleotide
ugcacutcaugtggaagauugau

SEQ ID NO: 1920 - RNA, 23 nt, Artificial Sequence
  Description of Artificial Sequence: Synthetic oligonucleotide
ugaauaagacauuuuguguuuug

SEQ ID NO: 1921 - RNA, 23 nt, Artificial Sequence
  Description of Artificial Sequence: Synthetic oligonucleotide
ugacgaguugaaagauccaggag

SEQ ID NO: 1922 - RNA, 23 nt, Artificial Sequence
  Description of Artificial Sequence: Synthetic oligonucleotide
ugucaaaaugucauagaguagua

SEQ ID NO: 1923 - RNA, 23 nt, Artificial Sequence
  Description of Artificial Sequence: Synthetic oligonucleotide
uacaggaagaugcaccaaggcua

SEQ ID NO: 1924 - RNA, 23 nt, Artificial Sequence
  Description of Artificial Sequence: Synthetic oligonucleotide
ucaagaaaggcauagcagcaaga

SEQ ID NO: 1925 - DNA, 23 bp, Artificial Sequence
  Description of Artificial Sequence: Synthetic oligonucleotide
  Description of Combined DNA/RNA Molecule: Synthetic oligonucleotide
ucagcuaauuctuuucucacuuc

SEQ ID NO: 1926 - DNA, 23 bp, Artificial Sequence
  Description of Artificial Sequence: Synthetic oligonucleotide
  Description of Combined DNA/RNA Molecule: Synthetic oligonucleotide
ucuggatuuactaagagaucucc

SEQ ID NO: 1927 - RNA, 23 nt, Artificial Sequence
  Description of Artificial Sequence: Synthetic oligonucleotide
ugugaaaagcagcacauuguggg

SEQ ID NO: 1928 - RNA, 23 nt, Artificial Sequence
  Description of Artificial Sequence: Synthetic oligonucleotide
uagacuaauucagcugaauucaa

SEQ ID NO: 1929 - DNA, 23 bp, Artificial Sequence
  Description of Artificial Sequence: Synthetic oligonucleotide
  Description of Combined DNA/RNA Molecule: Synthetic oligonucleotide
ucucaatgagutucugaauggug

SEQ ID NO: 1930 - DNA, 23 bp, Artificial Sequence
  Description of Artificial Sequence: Synthetic oligonucleotide
  Description of Combined DNA/RNA Molecule: Synthetic oligonucleotide
ucuaaatuuugcacuucaugugg

SEQ ID NO: 1931 - RNA, 23 nt, Artificial Sequence
  Description of Artificial Sequence: Synthetic oligonucleotide
ugcaagaaaggcauagcagcaag

SEQ ID NO: 1932 - RNA, 23 nt, Artificial Sequence
  Description of Artificial Sequence: Synthetic oligonucleotide
uaggguaugucucuuuuucccau

SEQ ID NO: 1933 - DNA, 23 bp, Artificial Sequence
  Description of Artificial Sequence: Synthetic oligonucleotide
  Description of Combined DNA/RNA Molecule: Synthetic oligonucleotide
ucaatctgagatauuggaauggu

SEQ ID NO: 1934 - DNA, 23 bp, Artificial Sequence
  Description of Artificial Sequence: Synthetic oligonucleotide
  Description of Combined DNA/RNA Molecule: Synthetic oligonucleotide
uguggatucacucaaacacauca

SEQ ID NO: 1935 - DNA, 23 bp, Artificial Sequence
  Description of Artificial Sequence: Synthetic oligonucleotide
  Description of Combined DNA/RNA Molecule: Synthetic oligonucleotide
uggaaacuguctuaauauuuuca

SEQ ID NO: 1936 - DNA, 23 bp, Artificial Sequence
  Description of Artificial Sequence: Synthetic oligonucleotide
  Description of Combined DNA/RNA Molecule: Synthetic oligonucleotide
ucaauctgagauauuggaauggu

SEQ ID NO: 1937 - RNA, 23 nt, Artificial Sequence
  Description of Artificial Sequence: Synthetic oligonucleotide
uccuaccagacaauaagcuucag

SEQ ID NO: 1938 - RNA, 23 nt, Artificial Sequence
  Description of Artificial Sequence: Synthetic oligonucleotide
uaacacaucaauggaguacugac

SEQ ID NO: 1939 - RNA, 23 nt, Artificial Sequence
  Description of Artificial Sequence: Synthetic oligonucleotide
uguuauaugacagguuaaacugu

SEQ ID NO: 1940 - DNA, 23 bp, Artificial Sequence
  Description of Artificial Sequence: Synthetic oligonucleotide
  Description of Combined DNA/RNA Molecule: Synthetic oligonucleotide
uauaauauuuctaggcaggucag

SEQ ID NO: 1941 - RNA, 23 nt, Artificial Sequence
  Description of Artificial Sequence: Synthetic oligonucleotide
uggaaacuucaaacccucuacua

SEQ ID NO: 1942 - RNA, 23 nt, Artificial Sequence
  Description of Artificial Sequence: Synthetic oligonucleotide
uagcaagauuguaucucuuucug

SEQ ID NO: 1943 - RNA, 23 nt, Artificial Sequence
  Description of Artificial Sequence: Synthetic oligonucleotide
ugacgaguugaaagauccaggag

SEQ ID NO: 1944 - RNA, 23 nt, Artificial Sequence
  Description of Artificial Sequence: Synthetic oligonucleotide
uaauuuguggauucacucaaaca

SEQ ID NO: 1945 - DNA, 23 bp, Artificial Sequence
  Description of Artificial Sequence: Synthetic oligonucleotide
  Description of Combined DNA/RNA Molecule: Synthetic oligonucleotide
uggaautgcaauacaaacaagug

SEQ ID NO: 1946 - DNA, 23 bp, Artificial Sequence
  Description of Artificial Sequence: Synthetic oligonucleotide
  Description of Combined DNA/RNA Molecule: Synthetic oligonucleotide
uagcaagauugtaucucuuucug

SEQ ID NO: 1947 - DNA, 23 bp, Artificial Sequence
  Description of Artificial Sequence: Synthetic oligonucleotide
  Description of Combined DNA/RNA Molecule: Synthetic oligonucleotide
utcuaaauuuugcacuucaugug

SEQ ID NO: 1948 - DNA, 23 bp, Artificial Sequence
  Description of Artificial Sequence: Synthetic oligonucleotide
  Description of Combined DNA/RNA Molecule: Synthetic oligonucleotide
ugaataagacatuuuguguuuug

SEQ ID NO: 1949 - DNA, 23 bp, Artificial Sequence
  Description of Artificial Sequence: Synthetic oligonucleotide
  Description of Combined DNA/RNA Molecule: Synthetic oligonucleotide
ucucaaacacatcaauggaguac

SEQ ID NO: 1950 - RNA, 23 nt, Artificial Sequence
  Description of Artificial Sequence: Synthetic oligonucleotide
uccgcaaguguggaagauuuaaa

SEQ ID NO: 1951 - RNA, 23 nt, Artificial Sequence
  Description of Artificial Sequence: Synthetic oligonucleotide
ugucagacagacuaauucagcug

SEQ ID NO: 1952 - RNA, 23 nt, Artificial Sequence
  Description of Artificial Sequence: Synthetic oligonucleotide
ugguauauaaucauggcugagug

SEQ ID NO: 1953 - RNA, 23 nt, Artificial Sequence
  Description of Artificial Sequence: Synthetic oligonucleotide
ugguauauaaucauggcugagug

SEQ ID NO: 1954 - RNA, 23 nt, Artificial Sequence
  Description of Artificial Sequence: Synthetic oligonucleotide
ugugacauguaguucuuuggaaa

SEQ ID NO: 1955 - DNA, 23 bp, Artificial Sequence
  Description of Artificial Sequence: Synthetic oligonucleotide
  Description of Combined DNA/RNA Molecule: Synthetic oligonucleotide
utcgacgaguugaaagauccagg

SEQ ID NO: 1956 - DNA, 23 bp, Artificial Sequence
  Description of Artificial Sequence: Synthetic oligonucleotide
  Description of Combined DNA/RNA Molecule: Synthetic oligonucleotide
uaacauaauautucuaggcaggu

SEQ ID NO: 1957 - RNA, 23 nt, Artificial Sequence
  Description of Artificial Sequence: Synthetic oligonucleotide
ugcuaaauaagaguucccuuaag

SEQ ID NO: 1958 - RNA, 23 nt, Artificial Sequence
  Description of Artificial Sequence: Synthetic oligonucleotide
ucgacgaguugaaagauccagga

SEQ ID NO: 1959 - RNA, 23 nt, Artificial Sequence
  Description of Artificial Sequence: Synthetic oligonucleotide
ugucggaugauaauuucagaguu

SEQ ID NO: 1960 - RNA, 23 nt, Artificial Sequence
  Description of Artificial Sequence: Synthetic oligonucleotide
ucagacagacuaauucagcugaa

SEQ ID NO: 1961 - DNA, 23 bp, Artificial Sequence
  Description of Artificial Sequence: Synthetic oligonucleotide
  Description of Combined DNA/RNA Molecule: Synthetic oligonucleotide
uggaautgcaatacaaacaagug

SEQ ID NO: 1962 - RNA, 23 nt, Artificial Sequence
  Description of Artificial Sequence: Synthetic oligonucleotide
uaugaagaaggacuccugauuca

SEQ ID NO: 1963 - RNA, 23 nt, Artificial Sequence
  Description of Artificial Sequence: Synthetic oligonucleotide
ugagauauuggaauggugagccu

SEQ ID NO: 1964 - DNA, 23 bp, Artificial Sequence
  Description of Artificial Sequence: Synthetic oligonucleotide
  Description of Combined DNA/RNA Molecule: Synthetic oligonucleotide
ugcacutcaugtggaagauugau

SEQ ID NO: 1965 - RNA, 23 nt, Artificial Sequence
  Description of Artificial Sequence: Synthetic oligonucleotide
ugaauaagacauuuuguguuuug

SEQ ID NO: 1966 - RNA, 23 nt, Artificial Sequence
  Description of Artificial Sequence: Synthetic oligonucleotide
ugacgaguugaaagauccaggag

SEQ ID NO: 1967 - RNA, 23 nt, Artificial Sequence
  Description of Artificial Sequence: Synthetic oligonucleotide
ugucaaaaugucauagaguagua

SEQ ID NO: 1968 - RNA, 23 nt, Artificial Sequence
  Description of Artificial Sequence: Synthetic oligonucleotide
uacaggaagaugcaccaaggcua

SEQ ID NO: 1969 - RNA, 23 nt, Artificial Sequence
  Description of Artificial Sequence: Synthetic oligonucleotide
ucaagaaaggcauagcagcaaga

SEQ ID NO: 1970 - DNA, 23 bp, Artificial Sequence
  Description of Artificial Sequence: Synthetic oligonucleotide
  Description of Combined DNA/RNA Molecule: Synthetic oligonucleotide
ucagcuaauuctuuucucacuuc

SEQ ID NO: 1971 - DNA, 23 bp, Artificial Sequence
  Description of Artificial Sequence: Synthetic oligonucleotide
  Description of Combined DNA/RNA Molecule: Synthetic oligonucleotide
ucuggatuuactaagagaucucc

SEQ ID NO: 1972 - RNA, 23 nt, Artificial Sequence
  Description of Artificial Sequence: Synthetic oligonucleotide
ugugaaaagcagcacauuguggg

SEQ ID NO: 1973 - RNA, 23 nt, Artificial Sequence
  Description of Artificial Sequence: Synthetic oligonucleotide
uagacuaauucagcugaauucaa

SEQ ID NO: 1974 - DNA, 23 bp, Artificial Sequence
  Description of Artificial Sequence: Synthetic oligonucleotide
  Description of Combined DNA/RNA Molecule: Synthetic oligonucleotide
ucucaatgagutucugaauggug

SEQ ID NO: 1975 - DNA, 23 bp, Artificial Sequence
  Description of Artificial Sequence: Synthetic oligonucleotide
  Description of Combined DNA/RNA Molecule: Synthetic oligonucleotide
ucuaaatuuugcacuucaugugg

SEQ ID NO: 1976 - RNA, 23 nt, Artificial Sequence
  Description of Artificial Sequence: Synthetic oligonucleotide
ugcaagaaaggcauagcagcaag

SEQ ID NO: 1977 - RNA, 23 nt, Artificial Sequence
  Description of Artificial Sequence: Synthetic oligonucleotide
uaggguaugucucuuuuucccau

SEQ ID NO: 1978 - DNA, 23 bp, Artificial Sequence
  Description of Artificial Sequence: Synthetic oligonucleotide
  Description of Combined DNA/RNA Molecule: Synthetic oligonucleotide
ucaatctgagatauuggaauggu

SEQ ID NO: 1979 - DNA, 23 bp, Artificial Sequence
  Description of Artificial Sequence: Synthetic oligonucleotide
  Description of Combined DNA/RNA Molecule: Synthetic oligonucleotide
uguggatucacucaaacacauca

SEQ ID NO: 1980 - DNA, 23 bp, Artificial Sequence
  Description of Artificial Sequence: Synthetic oligonucleotide
  Description of Combined DNA/RNA Molecule: Synthetic oligonucleotide
uggaaacuguctuaauauuuuca

SEQ ID NO: 1981 - DNA, 23 bp, Artificial Sequence
  Description of Artificial Sequence: Synthetic oligonucleotide
  Description of Combined DNA/RNA Molecule: Synthetic oligonucleotide
ucaauctgagauauuggaauggu

SEQ ID NO: 1982 - RNA, 23 nt, Artificial Sequence
  Description of Artificial Sequence: Synthetic oligonucleotide
uccuaccagacaauaagcuucag

SEQ ID NO: 1983 - RNA, 23 nt, Artificial Sequence
  Description of Artificial Sequence: Synthetic oligonucleotide
uaacacaucaauggaguacugac

SEQ ID NO: 1984 - RNA, 23 nt, Artificial Sequence
  Description of Artificial Sequence: Synthetic oligonucleotide
uguuauaugacagguuaaacugu

SEQ ID NO: 1985 - DNA, 23 bp, Artificial Sequence
  Description of Artificial Sequence: Synthetic oligonucleotide
  Description of Combined DNA/RNA Molecule: Synthetic oligonucleotide
uauaauauuuctaggcaggucag

SEQ ID NO: 1986 - RNA, 23 nt, Artificial Sequence
  Description of Artificial Sequence: Synthetic oligonucleotide
uggaaacuucaaacccucuacua

SEQ ID NO: 1987 - RNA, 23 nt, Artificial Sequence
  Description of Artificial Sequence: Synthetic oligonucleotide
uagcaagauuguaucucuuucug

SEQ ID NO: 1988 - RNA, 23 nt, Artificial Sequence
  Description of Artificial Sequence: Synthetic oligonucleotide
ugacgaguugaaagauccaggag

SEQ ID NO: 1989 - RNA, 23 nt, Artificial Sequence
  Description of Artificial Sequence: Synthetic oligonucleotide
uaauuuguggauucacucaaaca

SEQ ID NO: 1990 - RNA, 21 nt, Artificial Sequence
  Description of Artificial Sequence: Synthetic oligonucleotide
cuuguuuguauugcaauucca

SEQ ID NO: 1991 - RNA, 21 nt, Artificial Sequence
  Description of Artificial Sequence: Synthetic oligonucleotide
gaaagagauacaaucuugcua

SEQ ID NO: 1992 - RNA, 21 nt, Artificial Sequence
  Description of Artificial Sequence: Synthetic oligonucleotide
caugaagugcaaaauuuagaa

SEQ ID NO: 1993 - RNA, 21 nt, Artificial Sequence
  Description of Artificial Sequence: Synthetic oligonucleotide
aaacacaaaaugucuuauuca

SEQ ID NO: 1994 - RNA, 21 nt, Artificial Sequence
  Description of Artificial Sequence: Synthetic oligonucleotide
acuccauugauguguuugaga

SEQ ID NO: 1995 - RNA, 21 nt, Artificial Sequence
  Description of Artificial Sequence: Synthetic oligonucleotide
uaaaucuuccacacuugcgga

SEQ ID NO: 1996 - RNA, 21 nt, Artificial Sequence
  Description of Artificial Sequence: Synthetic oligonucleotide
gcugaauuagucugucugaca

SEQ ID NO: 1997 - RNA, 21 nt, Artificial Sequence
  Description of Artificial Sequence: Synthetic oligonucleotide
cucagccaugauuauauacca

SEQ ID NO: 1998 - RNA, 21 nt, Artificial Sequence
  Description of Artificial Sequence: Synthetic oligonucleotide
cucagccaugauuauauacca

SEQ ID NO: 1999 - RNA, 21 nt, Artificial Sequence
  Description of Artificial Sequence: Synthetic oligonucleotide
uccaaagaacuacaugucaca

SEQ ID NO: 2000 - RNA, 21 nt, Artificial Sequence
  Description of Artificial Sequence: Synthetic oligonucleotide
uggaucuuucaacucgucgaa

SEQ ID NO: 2001 - RNA, 21 nt, Artificial Sequence
  Description of Artificial Sequence: Synthetic oligonucleotide
cugccuagaaauauuauguua

SEQ ID NO: 2002 - RNA, 21 nt, Artificial Sequence
  Description of Artificial Sequence: Synthetic oligonucleotide
uaagggaacucuuauuuagca

SEQ ID NO: 2003 - RNA, 21 nt, Artificial Sequence
  Description of Artificial Sequence: Synthetic oligonucleotide
cuggaucuuucaacucgucga

SEQ ID NO: 2004 - RNA, 21 nt, Artificial Sequence
  Description of Artificial Sequence: Synthetic oligonucleotide
cucugaaauuaucauccgaca

SEQ ID NO: 2005 - RNA, 21 nt, Artificial Sequence
  Description of Artificial Sequence: Synthetic oligonucleotide
cagcugaauuagucugucuga

SEQ ID NO: 2006 - RNA, 21 nt, Artificial Sequence
  Description of Artificial Sequence: Synthetic oligonucleotide
cuuguuuguauugcaauucca

SEQ ID NO: 2007 - RNA, 21 nt, Artificial Sequence
  Description of Artificial Sequence: Synthetic oligonucleotide
aaucaggaguccuucuucaua

SEQ ID NO: 2008 - RNA, 21 nt, Artificial Sequence
  Description of Artificial Sequence: Synthetic oligonucleotide
gcucaccauuccaauaucuca

SEQ ID NO: 2009 - RNA, 21 nt, Artificial Sequence
  Description of Artificial Sequence: Synthetic oligonucleotide
caaucuuccacaugaagugca

SEQ ID NO: 2010 - RNA, 21 nt, Artificial Sequence
  Description of Artificial Sequence: Synthetic oligonucleotide
aaacacaaaaugucuuauuca

SEQ ID NO: 2011 - RNA, 21 nt, Artificial Sequence
  Description of Artificial Sequence: Synthetic oligonucleotide
ccuggaucuuucaacucguca

SEQ ID NO: 2012 - RNA, 21 nt, Artificial Sequence
  Description of Artificial Sequence: Synthetic oligonucleotide
cuacucuaugacauuuugaca

SEQ ID NO: 2013 - RNA, 21 nt, Artificial Sequence
  Description of Artificial Sequence: Synthetic oligonucleotide
gccuuggugcaucuuccugua

SEQ ID NO: 2014 - RNA, 21 nt, Artificial Sequence
  Description of Artificial Sequence: Synthetic oligonucleotide
uugcugcuaugccuuucuuga

SEQ ID NO: 2015 - RNA, 21 nt, Artificial Sequence
  Description of Artificial Sequence: Synthetic oligonucleotide
agugagaaaagaauuagcuga

SEQ ID NO: 2016 - RNA, 21 nt, Artificial Sequence
  Description of Artificial Sequence: Synthetic oligonucleotide
agaucucuuaguaaauccaga

SEQ ID NO: 2017 - RNA, 21 nt, Artificial Sequence
  Description of Artificial Sequence: Synthetic oligonucleotide
cacaaugugcugcuuuucaca

SEQ ID NO: 2018 - RNA, 21 nt, Artificial Sequence
  Description of Artificial Sequence: Synthetic oligonucleotide
gaauucagcugaauuagucua

SEQ ID NO: 2019 - RNA, 21 nt, Artificial Sequence
  Description of Artificial Sequence: Synthetic oligonucleotide
ccauucagaaacucauugaga

SEQ ID NO: 2020 - RNA, 21 nt, Artificial Sequence
  Description of Artificial Sequence: Synthetic oligonucleotide
acaugaagugcaaaauuuaga

SEQ ID NO: 2021 - RNA, 21 nt, Artificial Sequence
  Description of Artificial Sequence: Synthetic oligonucleotide
ugcugcuaugccuuucuugca

SEQ ID NO: 2022 - RNA, 21 nt, Artificial Sequence
  Description of Artificial Sequence: Synthetic oligonucleotide
gggaaaaagagacauacccua

SEQ ID NO: 2023 - RNA, 21 nt, Artificial Sequence
  Description of Artificial Sequence: Synthetic oligonucleotide
cauuccaauaucucagauuga

SEQ ID NO: 2024 - RNA, 21 nt, Artificial Sequence
  Description of Artificial Sequence: Synthetic oligonucleotide
auguguuugagugaauccaca

SEQ ID NO: 2025 - RNA, 21 nt, Artificial Sequence
  Description of Artificial Sequence: Synthetic oligonucleotide
aaaauauuaagacaguuucca

SEQ ID NO: 2026 - RNA, 21 nt, Artificial Sequence
  Description of Artificial Sequence: Synthetic oligonucleotide
cauuccaauaucucagauuga

SEQ ID NO: 2027 - RNA, 21 nt, Artificial Sequence
  Description of Artificial Sequence: Synthetic oligonucleotide
gaagcuuauugucugguagga

SEQ ID NO: 2028 - RNA, 21 nt, Artificial Sequence
  Description of Artificial Sequence: Synthetic oligonucleotide
caguacuccauugauguguua

SEQ ID NO: 2029 - RNA, 21 nt, Artificial Sequence
  Description of Artificial Sequence: Synthetic oligonucleotide
aguuuaaccugucauauaaca

SEQ ID NO: 2030 - RNA, 21 nt, Artificial Sequence
  Description of Artificial Sequence: Synthetic oligonucleotide
gaccugccuagaaauauuaua

SEQ ID NO: 2031 - RNA, 21 nt, Artificial Sequence
  Description of Artificial Sequence: Synthetic oligonucleotide
guagaggguuugaaguuucca

SEQ ID NO: 2032 - RNA, 21 nt, Artificial Sequence
  Description of Artificial Sequence: Synthetic oligonucleotide
gaaagagauacaaucuugcua

SEQ ID NO: 2033 - RNA, 21 nt, Artificial Sequence
  Description of Artificial Sequence: Synthetic oligonucleotide
ccuggaucuuucaacucguca

SEQ ID NO: 2034 - RNA, 21 nt, Artificial Sequence
  Description of Artificial Sequence: Synthetic oligonucleotide
uuugagugaauccacaaauua

SEQ ID NO: 2035 - RNA, 21 nt, Artificial Sequence
  Description of Artificial Sequence: Synthetic oligonucleotide
cuuguuuguauugcaauucca

SEQ ID NO: 2036 - RNA, 21 nt, Artificial Sequence
  Description of Artificial Sequence: Synthetic oligonucleotide
gaaagagauacaaucuugcua

SEQ ID NO: 2037 - RNA, 21 nt, Artificial Sequence
  Description of Artificial Sequence: Synthetic oligonucleotide
caugaagugcaaaauuuagaa

SEQ ID NO: 2038 - RNA, 21 nt, Artificial Sequence
  Description of Artificial Sequence: Synthetic oligonucleotide
aaacacaaaaugucuuauuca

SEQ ID NO: 2039 - RNA, 21 nt, Artificial Sequence
  Description of Artificial Sequence: Synthetic oligonucleotide
acuccauugauguguuugaga

SEQ ID NO: 2040 - RNA, 21 nt, Artificial Sequence
  Description of Artificial Sequence: Synthetic oligonucleotide
uaaaucuuccacacuugcgga

SEQ ID NO: 2041 - RNA, 21 nt, Artificial Sequence
  Description of Artificial Sequence: Synthetic oligonucleotide
gcugaauuagucugucugaca

SEQ ID NO: 2042 - RNA, 21 nt, Artificial Sequence
  Description of Artificial Sequence: Synthetic oligonucleotide
cucagccaugauuauauacca

SEQ ID NO: 2043 - RNA, 21 nt, Artificial Sequence
  Description of Artificial Sequence: Synthetic oligonucleotide
cucagccaugauuauauacca

SEQ ID NO: 2044 - RNA, 21 nt, Artificial Sequence
  Description of Artificial Sequence: Synthetic oligonucleotide
uccaaagaacuacaugucaca

SEQ ID NO: 2045 - RNA, 21 nt, Artificial Sequence
  Description of Artificial Sequence: Synthetic oligonucleotide
uggaucuuucaacucgucgaa

SEQ ID NO: 2046 - RNA, 21 nt, Artificial Sequence
  Description of Artificial Sequence: Synthetic oligonucleotide
cugccuagaaauauuauguua

SEQ ID NO: 2047 - RNA, 21 nt, Artificial Sequence
  Description of Artificial Sequence: Synthetic oligonucleotide
uaagggaacucuuauuuagca

SEQ ID NO: 2048 - RNA, 21 nt, Artificial Sequence
  Description of Artificial Sequence: Synthetic oligonucleotide
cuggaucuuucaacucgucga

SEQ ID NO: 2049 - RNA, 21 nt, Artificial Sequence
  Description of Artificial Sequence: Synthetic oligonucleotide
cucugaaauuaucauccgaca

SEQ ID NO: 2050 - RNA, 21 nt, Artificial Sequence
  Description of Artificial Sequence: Synthetic oligonucleotide
cagcugaauuagucugucuga

SEQ ID NO: 2051 - RNA, 21 nt, Artificial Sequence
  Description of Artificial Sequence: Synthetic oligonucleotide
cuuguuuguauugcaauucca

SEQ ID NO: 2052 - RNA, 21 nt, Artificial Sequence
  Description of Artificial Sequence: Synthetic oligonucleotide
aaucaggaguccuucuucaua

SEQ ID NO: 2053 - RNA, 21 nt, Artificial Sequence
  Description of Artificial Sequence: Synthetic oligonucleotide
gcucaccauuccaauaucuca

SEQ ID NO: 2054 - RNA, 21 nt, Artificial Sequence
  Description of Artificial Sequence: Synthetic oligonucleotide
caaucuuccacaugaagugca

SEQ ID NO: 2055 - RNA, 21 nt, Artificial Sequence
  Description of Artificial Sequence: Synthetic oligonucleotide
aaacacaaaaugucuuauuca

SEQ ID NO: 2056 - RNA, 21 nt, Artificial Sequence
  Description of Artificial Sequence: Synthetic oligonucleotide
ccuggaucuuucaacucguca

SEQ ID NO: 2057 - RNA, 21 nt, Artificial Sequence
  Description of Artificial Sequence: Synthetic oligonucleotide
cuacucuaugacauuuugaca

SEQ ID NO: 2058 - RNA, 21 nt, Artificial Sequence
  Description of Artificial Sequence: Synthetic oligonucleotide
gccuuggugcaucuuccugua

SEQ ID NO: 2059 - RNA, 21 nt, Artificial Sequence
  Description of Artificial Sequence: Synthetic oligonucleotide
uugcugcuaugccuuucuuga

SEQ ID NO: 2060 - RNA, 21 nt, Artificial Sequence
  Description of Artificial Sequence: Synthetic oligonucleotide
agugagaaaagaauuagcuga

SEQ ID NO: 2061 - RNA, 21 nt, Artificial Sequence
  Description of Artificial Sequence: Synthetic oligonucleotide
agaucucuuaguaaauccaga

SEQ ID NO: 2062 - RNA, 21 nt, Artificial Sequence
  Description of Artificial Sequence: Synthetic oligonucleotide
cacaaugugcugcuuuucaca

SEQ ID NO: 2063 - RNA, 21 nt, Artificial Sequence
  Description of Artificial Sequence: Synthetic oligonucleotide
gaauucagcugaauuagucua

SEQ ID NO: 2064 - RNA, 21 nt, Artificial Sequence
  Description of Artificial Sequence: Synthetic oligonucleotide
ccauucagaaacucauugaga

SEQ ID NO: 2065 - RNA, 21 nt, Artificial Sequence
  Description of Artificial Sequence: Synthetic oligonucleotide
acaugaagugcaaaauuuaga

SEQ ID NO: 2066 - RNA, 21 nt, Artificial Sequence
  Description of Artificial Sequence: Synthetic oligonucleotide
ugcugcuaugccuuucuugca

SEQ ID NO: 2067 - RNA, 21 nt, Artificial Sequence
  Description of Artificial Sequence: Synthetic oligonucleotide
gggaaaaagagacauacccua

SEQ ID NO: 2068 - RNA, 21 nt, Artificial Sequence
  Description of Artificial Sequence: Synthetic oligonucleotide
cauuccaauaucucagauuga

SEQ ID NO: 2069 - RNA, 21 nt, Artificial Sequence
  Description of Artificial Sequence: Synthetic oligonucleotide
auguguuugagugaauccaca

SEQ ID NO: 2070 - RNA, 21 nt, Artificial Sequence
  Description of Artificial Sequence: Synthetic oligonucleotide
aaaauauuaagacaguuucca

SEQ ID NO: 2071 - RNA, 21 nt, Artificial Sequence
  Description of Artificial Sequence: Synthetic oligonucleotide
cauuccaauaucucagauuga

SEQ ID NO: 2072 - RNA, 21 nt, Artificial Sequence
  Description of Artificial Sequence: Synthetic oligonucleotide
gaagcuuauugucugguagga

SEQ ID NO: 2073 - RNA, 21 nt, Artificial Sequence
  Description of Artificial Sequence: Synthetic oligonucleotide
caguacuccauugauguguua

SEQ ID NO: 2074 - RNA, 21 nt, Artificial Sequence
  Description of Artificial Sequence: Synthetic oligonucleotide
aguuuaaccugucauauaaca

SEQ ID NO: 2075 - RNA, 21 nt, Artificial Sequence
  Description of Artificial Sequence: Synthetic oligonucleotide
gaccugccuagaaauauuaua

SEQ ID NO: 2076 - RNA, 21 nt, Artificial Sequence
  Description of Artificial Sequence: Synthetic oligonucleotide
guagaggguuugaaguuucca

SEQ ID NO: 2077 - RNA, 21 nt, Artificial Sequence
  Description of Artificial Sequence: Synthetic oligonucleotide
gaaagagauacaaucuugcua

SEQ ID NO: 2078 - RNA, 21 nt, Artificial Sequence
  Description of Artificial Sequence: Synthetic oligonucleotide
ccuggaucuuucaacucguca

SEQ ID NO: 2079 - RNA, 21 nt, Artificial Sequence
  Description of Artificial Sequence: Synthetic oligonucleotide
uuugagugaauccacaaauua

SEQ ID NO: 2080 - DNA, 23 bp, Artificial Sequence
  Description of Artificial Sequence: Synthetic oligonucleotide
  Description of Combined DNA/RNA Molecule: Synthetic oligonucleotide
uggaautgcaauacaaacaagug

SEQ ID NO: 2081 - DNA, 23 bp, Artificial Sequence
  Description of Artificial Sequence: Synthetic oligonucleotide
  Description of Combined DNA/RNA Molecule: Synthetic oligonucleotide
uagcaagauugtaucucuuucug

SEQ ID NO: 2082 - DNA, 23 bp, Artificial Sequence
  Description of Artificial Sequence: Synthetic oligonucleotide
  Description of Combined DNA/RNA Molecule: Synthetic oligonucleotide
utcuaaauuuugcacuucaugug

SEQ ID NO: 2083 - DNA, 23 bp, Artificial Sequence
  Description of Artificial Sequence: Synthetic oligonucleotide
  Description of Combined DNA/RNA Molecule: Synthetic oligonucleotide
ugaataagacatuuuguguuuug

SEQ ID NO: 2084 - DNA, 23 bp, Artificial Sequence
  Description of Artificial Sequence: Synthetic oligonucleotide
  Description of Combined DNA/RNA Molecule: Synthetic oligonucleotide
ucucaaacacatcaauggaguac

SEQ ID NO: 2085 - DNA, 23 bp, Artificial Sequence
  Description of Artificial Sequence: Synthetic oligonucleotide
  Description of Combined DNA/RNA Molecule: Synthetic oligonucleotide
uccgcaaguguggaagauuuaaa

SEQ ID NO: 2086 - DNA, 23 bp, Artificial Sequence
  Description of Artificial Sequence: Synthetic oligonucleotide
  Description of Combined DNA/RNA Molecule: Synthetic oligonucleotide
ugucagacagacuaauucagcug

SEQ ID NO: 2087 - DNA, 23 bp, Artificial Sequence
  Description of Artificial Sequence: Synthetic oligonucleotide
  Description of Combined DNA/RNA Molecule: Synthetic oligonucleotide
ugguauauaaucauggcugagug

SEQ ID NO: 2088 - DNA, 23 bp, Artificial Sequence
  Description of Artificial Sequence: Synthetic oligonucleotide
  Description of Combined DNA/RNA Molecule: Synthetic oligonucleotide
ugguauauaaucauggcugagug

SEQ ID NO: 2089 - DNA, 23 bp, Artificial Sequence
  Description of Artificial Sequence: Synthetic oligonucleotide
  Description of Combined DNA/RNA Molecule: Synthetic oligonucleotide
ugugacauguaguucuuuggaaa

SEQ ID NO: 2090 - DNA, 23 bp, Artificial Sequence
  Description of Artificial Sequence: Synthetic oligonucleotide
  Description of Combined DNA/RNA Molecule: Synthetic oligonucleotide
utcgacgaguugaaagauccagg

SEQ ID NO: 2091 - DNA, 23 bp, Artificial Sequence
  Description of Artificial Sequence: Synthetic oligonucleotide
  Description of Combined DNA/RNA Molecule: Synthetic oligonucleotide
uaacauaauautucuaggcaggu

SEQ ID NO: 2092 - DNA, 23 bp, Artificial Sequence
  Description of Artificial Sequence: Synthetic oligonucleotide
  Description of Combined DNA/RNA Molecule: Synthetic oligonucleotide
ugcuaaauaagaguucccuuaag

SEQ ID NO: 2093 - DNA, 23 bp, Artificial Sequence
  Description of Artificial Sequence: Synthetic oligonucleotide
  Description of Combined DNA/RNA Molecule: Synthetic oligonucleotide
ucgacgaguugaaagauccagga

SEQ ID NO: 2094 - DNA, 23 bp, Artificial Sequence
  Description of Artificial Sequence: Synthetic oligonucleotide
  Description of Combined DNA/RNA Molecule: Synthetic oligonucleotide
ugucggaugauaauuucagaguu

SEQ ID NO: 2095 - DNA, 23 bp, Artificial Sequence
  Description of Artificial Sequence: Synthetic oligonucleotide
  Description of Combined DNA/RNA Molecule: Synthetic oligonucleotide
ucagacagacuaauucagcugaa

SEQ ID NO: 2096 - DNA, 23 bp, Artificial Sequence
  Description of Artificial Sequence: Synthetic oligonucleotide
  Description of Combined DNA/RNA Molecule: Synthetic oligonucleotide
uggaautgcaatacaaacaagug

SEQ ID NO: 2097 - DNA, 23 bp, Artificial Sequence
  Description of Artificial Sequence: Synthetic oligonucleotide
  Description of Combined DNA/RNA Molecule: Synthetic oligonucleotide
uaugaagaaggacuccugauuca

SEQ ID NO: 2098 - DNA, 23 bp, Artificial Sequence
  Description of Artificial Sequence: Synthetic oligonucleotide
  Description of Combined DNA/RNA Molecule: Synthetic oligonucleotide
ugagauauuggaauggugagccu

SEQ ID NO: 2099 - DNA, 23 bp, Artificial Sequence
  Description of Artificial Sequence: Synthetic oligonucleotide
  Description of Combined DNA/RNA Molecule: Synthetic oligonucleotide
ugcacutcaugtggaagauugau

SEQ ID NO: 2100 - DNA, 23 bp, Artificial Sequence
  Description of Artificial Sequence: Synthetic oligonucleotide
  Description of Combined DNA/RNA Molecule: Synthetic oligonucleotide
ugaataagacauuuuguguuuug

SEQ ID NO: 2101 - DNA, 23 bp, Artificial Sequence
  Description of Artificial Sequence: Synthetic oligonucleotide
  Description of Combined DNA/RNA Molecule: Synthetic oligonucleotide
ugacgaguugaaagauccaggag

SEQ ID NO: 2102 - DNA, 23 bp, Artificial Sequence
  Description of Artificial Sequence: Synthetic oligonucleotide
  Description of Combined DNA/RNA Molecule: Synthetic oligonucleotide
ugucaaaaugucauagaguagua

SEQ ID NO: 2103 - DNA, 23 bp, Artificial Sequence
  Description of Artificial Sequence: Synthetic oligonucleotide
  Description of Combined DNA/RNA Molecule: Synthetic oligonucleotide
uacaggaagaugcaccaaggcua

SEQ ID NO: 2104 - DNA, 23 bp, Artificial Sequence
  Description of Artificial Sequence: Synthetic oligonucleotide
  Description of Combined DNA/RNA Molecule: Synthetic oligonucleotide
ucaagaaaggcauagcagcaaga

SEQ ID NO: 2105 - DNA, 23 bp, Artificial Sequence
  Description of Artificial Sequence: Synthetic oligonucleotide
  Description of Combined DNA/RNA Molecule: Synthetic oligonucleotide
ucagcuaauuctuuucucacuuc

SEQ ID NO: 2106 - DNA, 23 bp, Artificial Sequence
  Description of Artificial Sequence: Synthetic oligonucleotide
  Description of Combined DNA/RNA Molecule: Synthetic oligonucleotide
ucuggatuuactaagagaucucc

SEQ ID NO: 2107 - DNA, 23 bp, Artificial Sequence
  Description of Artificial Sequence: Synthetic oligonucleotide
  Description of Combined DNA/RNA Molecule: Synthetic oligonucleotide
ugugaaaagcagcacauuguggg

SEQ ID NO: 2108 - DNA, 23 bp, Artificial Sequence
  Description of Artificial Sequence: Synthetic oligonucleotide
  Description of Combined DNA/RNA Molecule: Synthetic oligonucleotide
uagacuaauucagcugaauucaa

SEQ ID NO: 2109 - DNA, 23 bp, Artificial Sequence
  Description of Artificial Sequence: Synthetic oligonucleotide
  Description of Combined DNA/RNA Molecule: Synthetic oligonucleotide
ucucaatgagutucugaauggug

SEQ ID NO: 2110 - DNA, 23 bp, Artificial Sequence
  Description of Artificial Sequence: Synthetic oligonucleotide
  Description of Combined DNA/RNA Molecule: Synthetic oligonucleotide
ucuaaatuuugcacuucaugugg

SEQ ID NO: 2111 - DNA, 23 bp, Artificial Sequence
  Description of Artificial Sequence: Synthetic oligonucleotide
  Description of Combined DNA/RNA Molecule: Synthetic oligonucleotide
ugcaagaaaggcauagcagcaag

SEQ ID NO: 2112 - DNA, 23 bp, Artificial Sequence
  Description of Artificial Sequence: Synthetic oligonucleotide
  Description of Combined DNA/RNA Molecule: Synthetic oligonucleotide
uaggguaugucucuuuuucccau

SEQ ID NO: 2113 - DNA, 23 bp, Artificial Sequence
  Description of Artificial Sequence: Synthetic oligonucleotide
  Description of Combined DNA/RNA Molecule: Synthetic oligonucleotide
ucaatctgagatauuggaauggu

SEQ ID NO: 2114 - DNA, 23 bp, Artificial Sequence
  Description of Artificial Sequence: Synthetic oligonucleotide
  Description of Combined DNA/RNA Molecule: Synthetic oligonucleotide
uguggatucacucaaacacauca

SEQ ID NO: 2115 - DNA, 23 bp, Artificial Sequence
  Description of Artificial Sequence: Synthetic oligonucleotide
  Description of Combined DNA/RNA Molecule: Synthetic oligonucleotide
uggaaacuguctuaauauuuuca

SEQ ID NO: 2116 - DNA, 23 bp, Artificial Sequence
  Description of Artificial Sequence: Synthetic oligonucleotide
  Description of Combined DNA/RNA Molecule: Synthetic oligonucleotide
ucaatctgagauauuggaauggu

SEQ ID NO: 2117 - DNA, 23 bp, Artificial Sequence
  Description of Artificial Sequence: Synthetic oligonucleotide
  Description of Combined DNA/RNA Molecule: Synthetic oligonucleotide
uccuaccagacaauaagcuucag

SEQ ID NO: 2118 - DNA, 23 bp, Artificial Sequence
  Description of Artificial Sequence: Synthetic oligonucleotide
  Description of Combined DNA/RNA Molecule: Synthetic oligonucleotide
uaacacaucaauggaguacugac

SEQ ID NO: 2119 - DNA, 23 bp, Artificial Sequence
  Description of Artificial Sequence: Synthetic oligonucleotide
  Description of Combined DNA/RNA Molecule: Synthetic oligonucleotide
uguuauaugacagguuaaacugu

SEQ ID NO: 2120 - DNA, 23 bp, Artificial Sequence
  Description of Artificial Sequence: Synthetic oligonucleotide
  Description of Combined DNA/RNA Molecule: Synthetic oligonucleotide
uauaauauuuctaggcaggucag

SEQ ID NO: 2121 - DNA, 23 bp, Artificial Sequence
  Description of Artificial Sequence: Synthetic oligonucleotide
  Description of Combined DNA/RNA Molecule: Synthetic oligonucleotide
uggaaacuucaaacccucuacua

SEQ ID NO: 2122 - DNA, 23 bp, Artificial Sequence
  Description of Artificial Sequence: Synthetic oligonucleotide
  Description of Combined DNA/RNA Molecule: Synthetic oligonucleotide
uagcaagauuguaucucuuucug

SEQ ID NO: 2123 - DNA, 23 bp, Artificial Sequence
  Description of Artificial Sequence: Synthetic oligonucleotide
  Description of Combined DNA/RNA Molecule: Synthetic oligonucleotide
ugacgaguugaaagauccaggag

SEQ ID NO: 2124 - DNA, 23 bp, Artificial Sequence
  Description of Artificial Sequence: Synthetic oligonucleotide
  Description of Combined DNA/RNA Molecule: Synthetic oligonucleotide
uaautuguggauucacucaaaca

SEQ ID NO: 2125 - DNA, 23 bp, Artificial Sequence
  Description of Artificial Sequence: Synthetic oligonucleotide
  Description of Combined DNA/RNA Molecule: Synthetic oligonucleotide
uggaautgcaauacaaacaagug

SEQ ID NO: 2126 - DNA, 23 bp, Artificial Sequence
  Description of Artificial Sequence: Synthetic oligonucleotide
  Description of Combined DNA/RNA Molecule: Synthetic oligonucleotide
uagcaagauugtaucucuuucug

SEQ ID NO: 2127 - DNA, 23 bp, Artificial Sequence
  Description of Artificial Sequence: Synthetic oligonucleotide
  Description of Combined DNA/RNA Molecule: Synthetic oligonucleotide
utcuaaauuuugcacuucaugug

SEQ ID NO: 2128 - DNA, 23 bp, Artificial Sequence
  Description of Artificial Sequence: Synthetic oligonucleotide
  Description of Combined DNA/RNA Molecule: Synthetic oligonucleotide
ugaataagacatuuuguguuuug

SEQ ID NO: 2129 - DNA, 23 bp, Artificial Sequence
  Description of Artificial Sequence: Synthetic oligonucleotide
  Description of Combined DNA/RNA Molecule: Synthetic oligonucleotide
ucucaaacacatcaauggaguac

SEQ ID NO: 2130 - DNA, 23 bp, Artificial Sequence
  Description of Artificial Sequence: Synthetic oligonucleotide
  Description of Combined DNA/RNA Molecule: Synthetic oligonucleotide
uccgcaaguguggaagauuuaaa

SEQ ID NO: 2131 - DNA, 23 bp, Artificial Sequence
  Description of Artificial Sequence: Synthetic oligonucleotide
  Description of Combined DNA/RNA Molecule: Synthetic oligonucleotide
ugucagacagacuaauucagcug

SEQ ID NO: 2132 - DNA, 23 bp, Artificial Sequence
  Description of Artificial Sequence: Synthetic oligonucleotide
  Description of Combined DNA/RNA Molecule: Synthetic oligonucleotide
ugguauauaaucauggcugagug

SEQ ID NO: 2133 - DNA, 23 bp, Artificial Sequence
  Description of Artificial Sequence: Synthetic oligonucleotide
  Description of Combined DNA/RNA Molecule: Synthetic oligonucleotide
ugguauauaaucauggcugagug

SEQ ID NO: 2134 - DNA, 23 bp, Artificial Sequence
  Description of Artificial Sequence: Synthetic oligonucleotide
  Description of Combined DNA/RNA Molecule: Synthetic oligonucleotide
ugugacauguaguucuuuggaaa

SEQ ID NO: 2135 - DNA, 23 bp, Artificial Sequence
  Description of Artificial Sequence: Synthetic oligonucleotide
  Description of Combined DNA/RNA Molecule: Synthetic oligonucleotide
utcgacgaguugaaagauccagg

SEQ ID NO: 2136 - DNA, 23 bp, Artificial Sequence
  Description of Artificial Sequence: Synthetic oligonucleotide
  Description of Combined DNA/RNA Molecule: Synthetic oligonucleotide
uaacauaauautucuaggcaggu

SEQ ID NO: 2137 - DNA, 23 bp, Artificial Sequence
  Description of Artificial Sequence: Synthetic oligonucleotide
  Description of Combined DNA/RNA Molecule: Synthetic oligonucleotide
ugcuaaauaagaguucccuuaag

SEQ ID NO: 2138 - DNA, 23 bp, Artificial Sequence
  Description of Artificial Sequence: Synthetic oligonucleotide
  Description of Combined DNA/RNA Molecule: Synthetic oligonucleotide
ucgacgaguugaaagauccagga

SEQ ID NO: 2139 - DNA, 23 bp, Artificial Sequence
  Description of Artificial Sequence: Synthetic oligonucleotide
  Description of Combined DNA/RNA Molecule: Synthetic oligonucleotide
ugucggaugauaauuucagaguu

SEQ ID NO: 2140 - DNA, 23 bp, Artificial Sequence
  Description of Artificial Sequence: Synthetic oligonucleotide
  Description of Combined DNA/RNA Molecule: Synthetic oligonucleotide
ucagacagacuaauucagcugaa

SEQ ID NO: 2141 - DNA, 23 bp, Artificial Sequence
  Description of Artificial Sequence: Synthetic oligonucleotide
  Description of Combined DNA/RNA Molecule: Synthetic oligonucleotide
uggaautgcaatacaaacaagug

SEQ ID NO: 2142 - DNA, 23 bp, Artificial Sequence
  Description of Artificial Sequence: Synthetic oligonucleotide
  Description of Combined DNA/RNA Molecule: Synthetic oligonucleotide
uaugaagaaggacuccugauuca

SEQ ID NO: 2143 - DNA, 23 bp, Artificial Sequence
  Description of Artificial Sequence: Synthetic oligonucleotide
  Description of Combined DNA/RNA Molecule: Synthetic oligonucleotide
ugagauauuggaauggugagccu

SEQ ID NO: 2144 - DNA, 23 bp, Artificial Sequence
  Description of Artificial Sequence: Synthetic oligonucleotide
  Description of Combined DNA/RNA Molecule: Synthetic oligonucleotide
ugcacutcaugtggaagauugau

SEQ ID NO: 2145 - DNA, 23 bp, Artificial Sequence
  Description of Artificial Sequence: Synthetic oligonucleotide
  Description of Combined DNA/RNA Molecule: Synthetic oligonucleotide
ugaataagacauuuuguguuuug

SEQ ID NO: 2146 - DNA, 23 bp, Artificial Sequence
  Description of Artificial Sequence: Synthetic oligonucleotide
  Description of Combined DNA/RNA Molecule: Synthetic oligonucleotide
ugacgaguugaaagauccaggag

SEQ ID NO: 2147 - DNA, 23 bp, Artificial Sequence
  Description of Artificial Sequence: Synthetic oligonucleotide
  Description of Combined DNA/RNA Molecule: Synthetic oligonucleotide
ugucaaaaugucauagaguagua

SEQ ID NO: 2148 - DNA, 23 bp, Artificial Sequence
  Description of Artificial Sequence: Synthetic oligonucleotide
  Description of Combined DNA/RNA Molecule: Synthetic oligonucleotide
uacaggaagaugcaccaaggcua

SEQ ID NO: 2149 - DNA, 23 bp, Artificial Sequence
  Description of Artificial Sequence: Synthetic oligonucleotide
  Description of Combined DNA/RNA Molecule: Synthetic oligonucleotide
ucaagaaaggcauagcagcaaga

SEQ ID NO: 2150 - DNA, 23 bp, Artificial Sequence
  Description of Artificial Sequence: Synthetic oligonucleotide
  Description of Combined DNA/RNA Molecule: Synthetic oligonucleotide
ucagcuaauuctuuucucacuuc

SEQ ID NO: 2151 - DNA, 23 bp, Artificial Sequence
  Description of Artificial Sequence: Synthetic oligonucleotide
  Description of Combined DNA/RNA Molecule: Synthetic oligonucleotide
ucuggatuuactaagagaucucc

SEQ ID NO: 2152 - DNA, 23 bp, Artificial Sequence
  Description of Artificial Sequence: Synthetic oligonucleotide
  Description of Combined DNA/RNA Molecule: Synthetic oligonucleotide
ugugaaaagcagcacauuguggg

SEQ ID NO: 2153 - DNA, 23 bp, Artificial Sequence
  Description of Artificial Sequence: Synthetic oligonucleotide
  Description of Combined DNA/RNA Molecule: Synthetic oligonucleotide
uagacuaauucagcugaauucaa

SEQ ID NO: 2154 - DNA, 23 bp, Artificial Sequence
  Description of Artificial Sequence: Synthetic oligonucleotide
  Description of Combined DNA/RNA Molecule: Synthetic oligonucleotide
ucucaatgagutucugaauggug

SEQ ID NO: 2155 - DNA, 23 bp, Artificial Sequence
  Description of Artificial Sequence: Synthetic oligonucleotide
  Description of Combined DNA/RNA Molecule: Synthetic oligonucleotide
ucuaaatuuugcacuucaugugg

SEQ ID NO: 2156 - DNA, 23 bp, Artificial Sequence
  Description of Artificial Sequence: Synthetic oligonucleotide
  Description of Combined DNA/RNA Molecule: Synthetic oligonucleotide
ugcaagaaaggcauagcagcaag

SEQ ID NO: 2157 - DNA, 23 bp, Artificial Sequence
  Description of Artificial Sequence: Synthetic oligonucleotide
  Description of Combined DNA/RNA Molecule: Synthetic oligonucleotide
uaggguaugucucuuuuucccau

SEQ ID NO: 2158 - DNA, 23 bp, Artificial Sequence
  Description of Artificial Sequence: Synthetic oligonucleotide
  Description of Combined DNA/RNA Molecule: Synthetic oligonucleotide
ucaatctgagatauuggaauggu

SEQ ID NO: 2159 - DNA, 23 bp, Artificial Sequence
  Description of Artificial Sequence: Synthetic oligonucleotide
  Description of Combined DNA/RNA Molecule: Synthetic oligonucleotide
uguggatucacucaaacacauca

SEQ ID NO: 2160 - DNA, 23 bp, Artificial Sequence
  Description of Artificial Sequence: Synthetic oligonucleotide
  Description of Combined DNA/RNA Molecule: Synthetic oligonucleotide
uggaaacuguctuaauauuuuca

SEQ ID NO: 2161 - DNA, 23 bp, Artificial Sequence
  Description of Artificial Sequence: Synthetic oligonucleotide
  Description of Combined DNA/RNA Molecule: Synthetic oligonucleotide
ucaatctgagauauuggaauggu

SEQ ID NO: 2162 - DNA, 23 bp, Artificial Sequence
  Description of Artificial Sequence: Synthetic oligonucleotide
  Description of Combined DNA/RNA Molecule: Synthetic oligonucleotide
uccuaccagacaauaagcuucag

SEQ ID NO: 2163 - DNA, 23 bp, Artificial Sequence
  Description of Artificial Sequence: Synthetic oligonucleotide
  Description of Combined DNA/RNA Molecule: Synthetic oligonucleotide
uaacacaucaauggaguacugac

SEQ ID NO: 2164 - DNA, 23 bp, Artificial Sequence
  Description of Artificial Sequence: Synthetic oligonucleotide
  Description of Combined DNA/RNA Molecule: Synthetic oligonucleotide
uguuauaugacagguuaaacugu

SEQ ID NO: 2165 - DNA, 23 bp, Artificial Sequence
  Description of Artificial Sequence: Synthetic oligonucleotide
  Description of Combined DNA/RNA Molecule: Synthetic oligonucleotide
uauaauauuuctaggcaggucag

SEQ ID NO: 2166 - DNA, 23 bp, Artificial Sequence
  Description of Artificial Sequence: Synthetic oligonucleotide
  Description of Combined DNA/RNA Molecule: Synthetic oligonucleotide
uggaaacuucaaacccucuacua

SEQ ID NO: 2167 - DNA, 23 bp, Artificial Sequence
  Description of Artificial Sequence: Synthetic oligonucleotide
  Description of Combined DNA/RNA Molecule: Synthetic oligonucleotide
uagcaagauuguaucucuuucug

SEQ ID NO: 2168 - DNA, 23 bp, Artificial Sequence
  Description of Artificial Sequence: Synthetic oligonucleotide
  Description of Combined DNA/RNA Molecule: Synthetic oligonucleotide
ugacgaguugaaagauccaggag

SEQ ID NO: 2169 - DNA, 23 bp, Artificial Sequence
  Description of Artificial Sequence: Synthetic oligonucleotide
  Description of Combined DNA/RNA Molecule: Synthetic oligonucleotide
uaautuguggauucacucaaaca

SEQ ID NO: 2170 - RNA, 23 nt, Artificial Sequence
  Description of Artificial Sequence: Synthetic oligonucleotide
cacuuguuuguauugcaauuccu

SEQ ID NO: 2171 - RNA, 23 nt, Artificial Sequence
  Description of Artificial Sequence: Synthetic oligonucleotide
cagaaagagauacaaucuugcuu

SEQ ID NO: 2172 - RNA, 23 nt, Artificial Sequence
  Description of Artificial Sequence: Synthetic oligonucleotide
cacaugaagugcaaaauuuagaa

SEQ ID NO: 2173 - RNA, 23 nt, Artificial Sequence
  Description of Artificial Sequence: Synthetic oligonucleotide
caaaacacaaaaugucuuauucu

SEQ ID NO: 2174 - RNA, 23 nt, Artificial Sequence
  Description of Artificial Sequence: Synthetic oligonucleotide
guacuccauugauguguuugagu

SEQ ID NO: 2175 - RNA, 23 nt, Artificial Sequence
  Description of Artificial Sequence: Synthetic oligonucleotide
uuuaaaucuuccacacuugcggu

SEQ ID NO: 2176 - RNA, 23 nt, Artificial Sequence
  Description of Artificial Sequence: Synthetic oligonucleotide
cagcugaauuagucugucugacg

SEQ ID NO: 2177 - RNA, 23 nt, Artificial Sequence
  Description of Artificial Sequence: Synthetic oligonucleotide
cacucagccaugauuauauaccg

SEQ ID NO: 2178 - RNA, 23 nt, Artificial Sequence
  Description of Artificial Sequence: Synthetic oligonucleotide
cacucagccaugauuauauaccg

SEQ ID NO: 2179 - RNA, 23 nt, Artificial Sequence
  Description of Artificial Sequence: Synthetic oligonucleotide
uuuccaaagaacuacaugucaca

SEQ ID NO: 2180 - RNA, 23 nt, Artificial Sequence
  Description of Artificial Sequence: Synthetic oligonucleotide
ccuggaucuuucaacucgucgac

SEQ ID NO: 2181 - RNA, 23 nt, Artificial Sequence
  Description of Artificial Sequence: Synthetic oligonucleotide
accugccuagaaauauuauguug

SEQ ID NO: 2182 - RNA, 23 nt, Artificial Sequence
  Description of Artificial Sequence: Synthetic oligonucleotide
cuuaagggaacucuuauuuagcc

SEQ ID NO: 2183 - RNA, 23 nt, Artificial Sequence
  Description of Artificial Sequence: Synthetic oligonucleotide
uccuggaucuuucaacucgucga

SEQ ID NO: 2184 - RNA, 23 nt, Artificial Sequence
  Description of Artificial Sequence: Synthetic oligonucleotide
aacucugaaauuaucauccgacu

SEQ ID NO: 2185 - RNA, 23 nt, Artificial Sequence
  Description of Artificial Sequence: Synthetic oligonucleotide
uucagcugaauuagucugucuga

SEQ ID NO: 2186 - RNA, 23 nt, Artificial Sequence
  Description of Artificial Sequence: Synthetic oligonucleotide
cacuuguuuguauugcaauuccu

SEQ ID NO: 2187 - RNA, 23 nt, Artificial Sequence
  Description of Artificial Sequence: Synthetic oligonucleotide
ugaaucaggaguccuucuucauu

SEQ ID NO: 2188 - RNA, 23 nt, Artificial Sequence
  Description of Artificial Sequence: Synthetic oligonucleotide
aggcucaccauuccaauaucuca

SEQ ID NO: 2189 - RNA, 23 nt, Artificial Sequence
  Description of Artificial Sequence: Synthetic oligonucleotide
aucaaucuuccacaugaagugca

SEQ ID NO: 2190 - RNA, 23 nt, Artificial Sequence
  Description of Artificial Sequence: Synthetic oligonucleotide
caaaacacaaaaugucuuauucu

SEQ ID NO: 2191 - RNA, 23 nt, Artificial Sequence
  Description of Artificial Sequence: Synthetic oligonucleotide
cuccuggaucuuucaacucgucg

SEQ ID NO: 2192 - RNA, 23 nt, Artificial Sequence
  Description of Artificial Sequence: Synthetic oligonucleotide
uacuacucuaugacauuuugaca

SEQ ID NO: 2193 - RNA, 23 nt, Artificial Sequence
  Description of Artificial Sequence: Synthetic oligonucleotide
uagccuuggugcaucuuccuguu

SEQ ID NO: 2194 - RNA, 23 nt, Artificial Sequence
  Description of Artificial Sequence: Synthetic oligonucleotide
ucuugcugcuaugccuuucuugc

SEQ ID NO: 2195 - RNA, 23 nt, Artificial Sequence
  Description of Artificial Sequence: Synthetic oligonucleotide
gaagugagaaaagaauuagcuga

SEQ ID NO: 2196 - RNA, 23 nt, Artificial Sequence
  Description of Artificial Sequence: Synthetic oligonucleotide
ggagaucucuuaguaaauccaga

SEQ ID NO: 2197 - RNA, 23 nt, Artificial Sequence
  Description of Artificial Sequence: Synthetic oligonucleotide
cccacaaugugcugcuuuucaca

SEQ ID NO: 2198 - RNA, 23 nt, Artificial Sequence
  Description of Artificial Sequence: Synthetic oligonucleotide
uugaauucagcugaauuagucug

SEQ ID NO: 2199 - RNA, 23 nt, Artificial Sequence
  Description of Artificial Sequence: Synthetic oligonucleotide
caccauucagaaacucauugaga

SEQ ID NO: 2200 - RNA, 23 nt, Artificial Sequence
  Description of Artificial Sequence: Synthetic oligonucleotide
ccacaugaagugcaaaauuuaga

SEQ ID NO: 2201 - RNA, 23 nt, Artificial Sequence
  Description of Artificial Sequence: Synthetic oligonucleotide
cuugcugcuaugccuuucuugcc

SEQ ID NO: 2202 - RNA, 23 nt, Artificial Sequence
  Description of Artificial Sequence: Synthetic oligonucleotide
augggaaaaagagacauacccua

SEQ ID NO: 2203 - RNA, 23 nt, Artificial Sequence
  Description of Artificial Sequence: Synthetic oligonucleotide
accauuccaauaucucagauugc

SEQ ID NO: 2204 - RNA, 23 nt, Artificial Sequence
  Description of Artificial Sequence: Synthetic oligonucleotide
ugauguguuugagugaauccaca

SEQ ID NO: 2205 - RNA, 23 nt, Artificial Sequence
  Description of Artificial Sequence: Synthetic oligonucleotide
ugaaaauauuaagacaguuuccc

SEQ ID NO: 2206 - RNA, 23 nt, Artificial Sequence
  Description of Artificial Sequence: Synthetic oligonucleotide
accauuccaauaucucagauugc

SEQ ID NO: 2207 - RNA, 23 nt, Artificial Sequence
  Description of Artificial Sequence: Synthetic oligonucleotide
cugaagcuuauugucugguagga

SEQ ID NO: 2208 - RNA, 23 nt, Artificial Sequence
  Description of Artificial Sequence: Synthetic oligonucleotide
gucaguacuccauugauguguuu

SEQ ID NO: 2209 - RNA, 23 nt, Artificial Sequence
  Description of Artificial Sequence: Synthetic oligonucleotide
acaguuuaaccugucauauaacc

SEQ ID NO: 2210 - RNA, 23 nt, Artificial Sequence
  Description of Artificial Sequence: Synthetic oligonucleotide
cugaccugccuagaaauauuaug

SEQ ID NO: 2211 - RNA, 23 nt, Artificial Sequence
  Description of Artificial Sequence: Synthetic oligonucleotide
uaguagaggguuugaaguuucca

SEQ ID NO: 2212 - RNA, 23 nt, Artificial Sequence
  Description of Artificial Sequence: Synthetic oligonucleotide
cagaaagagauacaaucuugcuu

SEQ ID NO: 2213 - RNA, 23 nt, Artificial Sequence
  Description of Artificial Sequence: Synthetic oligonucleotide
cuccuggaucuuucaacucgucg

SEQ ID NO: 2214 - RNA, 23 nt, Artificial Sequence
  Description of Artificial Sequence: Synthetic oligonucleotide
uguuugagugaauccacaaauuc

SEQ ID NO: 2215 - RNA, 23 nt, Artificial Sequence
  Description of Artificial Sequence: Synthetic oligonucleotide
cacuuguuuguauugcaauuccu

SEQ ID NO: 2216 - RNA, 23 nt, Artificial Sequence
  Description of Artificial Sequence: Synthetic oligonucleotide
cagaaagagauacaaucuugcuu

SEQ ID NO: 2217 - RNA, 23 nt, Artificial Sequence
  Description of Artificial Sequence: Synthetic oligonucleotide
cacaugaagugcaaaauuuagaa

SEQ ID NO: 2218 - RNA, 23 nt, Artificial Sequence
  Description of Artificial Sequence: Synthetic oligonucleotide
caaaacacaaaaugucuuauucu

SEQ ID NO: 2219 - RNA, 23 nt, Artificial Sequence
  Description of Artificial Sequence: Synthetic oligonucleotide
guacuccauugauguguuugagu

SEQ ID NO: 2220 - RNA, 23 nt, Artificial Sequence
  Description of Artificial Sequence: Synthetic oligonucleotide
uuuaaaucuuccacacuugcggu

SEQ ID NO: 2221 - RNA, 23 nt, Artificial Sequence
  Description of Artificial Sequence: Synthetic oligonucleotide
cagcugaauuagucugucugacg

SEQ ID NO: 2222 - RNA, 23 nt, Artificial Sequence
  Description of Artificial Sequence: Synthetic oligonucleotide
cacucagccaugauuauauaccg

SEQ ID NO: 2223 - RNA, 23 nt, Artificial Sequence
  Description of Artificial Sequence: Synthetic oligonucleotide
cacucagccaugauuauauaccg

SEQ ID NO: 2224 - RNA, 23 nt, Artificial Sequence
  Description of Artificial Sequence: Synthetic oligonucleotide
uuuccaaagaacuacaugucaca

SEQ ID NO: 2225 - RNA, 23 nt, Artificial Sequence
  Description of Artificial Sequence: Synthetic oligonucleotide
ccuggaucuuucaacucgucgac

SEQ ID NO: 2226 - RNA, 23 nt, Artificial Sequence
  Description of Artificial Sequence: Synthetic oligonucleotide
accugccuagaaauauuauguug

SEQ ID NO: 2227 - RNA, 23 nt, Artificial Sequence
  Description of Artificial Sequence: Synthetic oligonucleotide
cuuaagggaacucuuauuuagcc

SEQ ID NO: 2228 - RNA, 23 nt, Artificial Sequence
  Description of Artificial Sequence: Synthetic oligonucleotide
uccuggaucuuucaacucgucga

SEQ ID NO: 2229 - RNA, 23 nt, Artificial Sequence
  Description of Artificial Sequence: Synthetic oligonucleotide
aacucugaaauuaucauccgacu

SEQ ID NO: 2230 - RNA, 23 nt, Artificial Sequence
  Description of Artificial Sequence: Synthetic oligonucleotide
uucagcugaauuagucugucuga

SEQ ID NO: 2231 - RNA, 23 nt, Artificial Sequence
  Description of Artificial Sequence: Synthetic oligonucleotide
cacuuguuuguauugcaauuccu

SEQ ID NO: 2232 - RNA, 23 nt, Artificial Sequence
  Description of Artificial Sequence: Synthetic oligonucleotide
ugaaucaggaguccuucuucauu

SEQ ID NO: 2233 - RNA, 23 nt, Artificial Sequence
  Description of Artificial Sequence: Synthetic oligonucleotide
aggcucaccauuccaauaucuca

SEQ ID NO: 2234 - RNA, 23 nt, Artificial Sequence
  Description of Artificial Sequence: Synthetic oligonucleotide
aucaaucuuccacaugaagugca

SEQ ID NO: 2235 - RNA, 23 nt, Artificial Sequence
  Description of Artificial Sequence: Synthetic oligonucleotide
caaaacacaaaaugucuuauucu

SEQ ID NO: 2236 - RNA, 23 nt, Artificial Sequence
  Description of Artificial Sequence: Synthetic oligonucleotide
cuccuggaucuuucaacucgucg

SEQ ID NO: 2237 - RNA, 23 nt, Artificial Sequence
  Description of Artificial Sequence: Synthetic oligonucleotide
uacuacucuaugacauuuugaca

SEQ ID NO: 2238 - RNA, 23 nt, Artificial Sequence
  Description of Artificial Sequence: Synthetic oligonucleotide
uagccuuggugcaucuuccuguu

SEQ ID NO: 2239 - RNA, 23 nt, Artificial Sequence
  Description of Artificial Sequence: Synthetic oligonucleotide
ucuugcugcuaugccuuucuugc

SEQ ID NO: 2240 - RNA, 23 nt, Artificial Sequence
  Description of Artificial Sequence: Synthetic oligonucleotide
gaagugagaaaagaauuagcuga

SEQ ID NO: 2241 - RNA, 23 nt, Artificial Sequence
  Description of Artificial Sequence: Synthetic oligonucleotide
ggagaucucuuaguaaauccaga

SEQ ID NO: 2242 - RNA, 23 nt, Artificial Sequence
  Description of Artificial Sequence: Synthetic oligonucleotide
cccacaaugugcugcuuuucaca

SEQ ID NO: 2243 - RNA, 23 nt, Artificial Sequence
  Description of Artificial Sequence: Synthetic oligonucleotide
uugaauucagcugaauuagucug

SEQ ID NO: 2244 - RNA, 23 nt, Artificial Sequence
  Description of Artificial Sequence: Synthetic oligonucleotide
caccauucagaaacucauugaga

SEQ ID NO: 2245 - RNA, 23 nt, Artificial Sequence
  Description of Artificial Sequence: Synthetic oligonucleotide
ccacaugaagugcaaaauuuaga

SEQ ID NO: 2246 - RNA, 23 nt, Artificial Sequence
  Description of Artificial Sequence: Synthetic oligonucleotide
cuugcugcuaugccuuucuugcc

SEQ ID NO: 2247 - RNA, 23 nt, Artificial Sequence
  Description of Artificial Sequence: Synthetic oligonucleotide
augggaaaaagagacauacccua

SEQ ID NO: 2248 - RNA, 23 nt, Artificial Sequence
  Description of Artificial Sequence: Synthetic oligonucleotide
accauuccaauaucucagauugc

SEQ ID NO: 2249 - RNA, 23 nt, Artificial Sequence
  Description of Artificial Sequence: Synthetic oligonucleotide
ugauguguuugagugaauccaca

SEQ ID NO: 2250 - RNA, 23 nt, Artificial Sequence
  Description of Artificial Sequence: Synthetic oligonucleotide
ugaaaauauuaagacaguuuccc

SEQ ID NO: 2251 - RNA, 23 nt, Artificial Sequence
  Description of Artificial Sequence: Synthetic oligonucleotide
accauuccaauaucucagauugc

SEQ ID NO: 2252 - RNA, 23 nt, Artificial Sequence
  Description of Artificial Sequence: Synthetic oligonucleotide
cugaagcuuauugucugguagga

SEQ ID NO: 2253 - RNA, 23 nt, Artificial Sequence
  Description of Artificial Sequence: Synthetic oligonucleotide
gucaguacuccauugauguguuu

SEQ ID NO: 2254 - RNA, 23 nt, Artificial Sequence
  Description of Artificial Sequence: Synthetic oligonucleotide
acaguuuaaccugucauauaacc

SEQ ID NO: 2255 - RNA, 23 nt, Artificial Sequence
  Description of Artificial Sequence: Synthetic oligonucleotide
cugaccugccuagaaauauuaug

SEQ ID NO: 2256 - RNA, 23 nt, Artificial Sequence
  Description of Artificial Sequence: Synthetic oligonucleotide
uaguagaggguuugaaguuucca

SEQ ID NO: 2257 - RNA, 23 nt, Artificial Sequence
  Description of Artificial Sequence: Synthetic oligonucleotide
cagaaagagauacaaucuugcuu

SEQ ID NO: 2258 - RNA, 23 nt, Artificial Sequence
  Description of Artificial Sequence: Synthetic oligonucleotide
cuccuggaucuuucaacucgucg

SEQ ID NO: 2259 - RNA, 23 nt, Artificial Sequence
  Description of Artificial Sequence: Synthetic oligonucleotide
uguuugagugaauccacaaauuc

SEQ ID NO: 2260 - RNA, 33 nt, Artificial Sequence
  Description of Artificial Sequence: Synthetic oligonucleotide
ugaauuuucuugcugcuaugccuuucuugccuc

SEQ ID NO: 2261 - RNA, 56 nt, Artificial Sequence
  Description of Artificial Sequence: Synthetic oligonucleotide
ugaacuuaagggaacucuuauuuagccauaaucagaucagcaucuuggacuugagu

SEQ ID NO: 2262 - RNA, 29 nt, Artificial Sequence
  Description of Artificial Sequence: Synthetic oligonucleotide
aacucugaaauuaucauccgacuauauga

SEQ ID NO: 2263 - RNA, 28 nt, Artificial Sequence
  Description of Artificial Sequence: Synthetic oligonucleotide
cugaagcuuauugucugguaggaucuga

SEQ ID NO: 2264 - RNA, 41 nt, Artificial Sequence
  Description of Artificial Sequence: Synthetic oligonucleotide
uaaaaauuacaguuccuucuuguagaaaaggcuguauucuu

SEQ ID NO: 2265 - RNA, 31 nt, Artificial Sequence
  Description of Artificial Sequence: Synthetic oligonucleotide
aggcucaccauuccaauaucucagauugccc

SEQ ID NO: 2266 - RNA, 26 nt, Artificial Sequence
  Description of Artificial Sequence: Synthetic oligonucleotide
cugaccugccuagaaauauuauguug

SEQ ID NO: 2267 - RNA, 25 nt, Artificial Sequence
  Description of Artificial Sequence: Synthetic oligonucleotide
ccacucagccaugauuauauaccga

SEQ ID NO: 2268 - RNA, 32 nt, Artificial Sequence
  Description of Artificial Sequence: Synthetic oligonucleotide
cccacaaugugcugcuuuucacacuguauccc

SEQ ID NO: 2269 - RNA, 44 nt, Artificial Sequence
  Description of Artificial Sequence: Synthetic oligonucleotide
ucuuugacauuuugaauucagcugaauuagucugucugacgaga

SEQ ID NO: 2270 - RNA, 30 nt, Artificial Sequence
  Description of Artificial Sequence: Synthetic oligonucleotide
gauaguagaauauugugcuuagccuuggug

SEQ ID NO: 2271 - RNA, 24 nt, Artificial Sequence
  Description of Artificial Sequence: Synthetic oligonucleotide
uagccuuggugcaucuuccuguug

SEQ ID NO: 2272 - RNA, 46 nt, Artificial Sequence
  Description of Artificial Sequence: Synthetic oligonucleotide
gaaaugucaguacuccauugauguguuugagugaauccacaaauuc

SEQ ID NO: 2273 - RNA, 41 nt, Artificial Sequence
  Description of Artificial Sequence: Synthetic oligonucleotide
gggaggauguggcacaaagauuuucuccuuuucuaaugauu

SEQ ID NO: 2274 - RNA, 25 nt, Artificial Sequence
  Description of Artificial Sequence: Synthetic oligonucleotide
uuucuaaugauuucaccauucagaa

SEQ ID NO: 2275 - RNA, 45 nt, Artificial Sequence
  Description of Artificial Sequence: Synthetic oligonucleotide
caccauucagaaacucauugagacaagaacaagccaacuguuuuc

SEQ ID NO: 2276 - RNA, 28 nt, Artificial Sequence
  Description of Artificial Sequence: Synthetic oligonucleotide
caaaacacaaaaugucuuauucugggag

SEQ ID NO: 2277 - RNA, 25 nt, Artificial Sequence
  Description of Artificial Sequence: Synthetic oligonucleotide
cuccuggaucuuucaacucgucgac

SEQ ID NO: 2278 - RNA, 69 nt, Artificial Sequence
  Description of Artificial Sequence: Synthetic oligonucleotide
cagaaagagauacaaucuugcuugaccguuugggacaucaaucuuccacaugaagugcaaaauuuagaa

SEQ ID NO: 2279 - RNA, 24 nt, Artificial Sequence
  Description of Artificial Sequence: Synthetic oligonucleotide
ugaaaauauuaagacaguuuccca

SEQ ID NO: 2280 - RNA, 24 nt, Artificial Sequence
  Description of Artificial Sequence: Synthetic oligonucleotide
ucuugcugcuaugccuuucuugcc

SEQ ID NO: 2281 - RNA, 29 nt, Artificial Sequence
  Description of Artificial Sequence: Synthetic oligonucleotide
aacucugaaauuaucauccgacuauauga

SEQ ID NO: 2282 - RNA, 29 nt, Artificial Sequence
  Description of Artificial Sequence: Synthetic oligonucleotide
aggcucaccauuccaauaucucagauugc

SEQ ID NO: 2283 - RNA, 26 nt, Artificial Sequence
  Description of Artificial Sequence: Synthetic oligonucleotide
cugaccugccuagaaauauuauguug

SEQ ID NO: 2284 - RNA, 24 nt, Artificial Sequence
  Description of Artificial Sequence: Synthetic oligonucleotide
cacucagccaugauuauauaccga

SEQ ID NO: 2285 - RNA, 31 nt, Artificial Sequence
  Description of Artificial Sequence: Synthetic oligonucleotide
uugaauucagcugaauuagucugucugacga

SEQ ID NO: 2286 - RNA, 28 nt, Artificial Sequence
  Description of Artificial Sequence: Synthetic oligonucleotide
ugauguguuugagugaauccacaaauuc

SEQ ID NO: 2287 - RNA, 25 nt, Artificial Sequence
  Description of Artificial Sequence: Synthetic oligonucleotide
cuccuggaucuuucaacucgucgac

SEQ ID NO: 2288 - RNA, 24 nt, Artificial Sequence
  Description of Artificial Sequence: Synthetic oligonucleotide
ccacaugaagugcaaaauuuagaa
